United States Patent Application Publication US 2024/0050491 A1 - sequence listing, part 4

SEQ ID NO: 20 - DNA, 4150193 bp, Bacillus velezensis (residues 2,075,098-4,150,193 of 4,150,193)
  source 1..4150193: mol_type = genomic DNA
ctgccacagaaagcactacagaggagccaatgaattctgaagacgagggggactcttacgttcagagcgttgaggatagccaaaaagaatttaactttagtcttgatgaatttgtacaaactttcaatgaaactgcccaagatattgaaaacaatgaccttagcctaattaataaagatgatatcggagattttaaacttaccgaagtcaaagatgttacagtttacacaaaagagctaaaaacagatactgatggctccggtggaactttcactttggcagcatggtatgacaacaatcataaattctaccgtttacagttaagcacctgtggttcagataatatggcttctccaataggtctggctaatatatttgctgtttttcaaactttaggaattgatgaagatcatttatatgaccttttaaaaagtgacgaagaaattcttaatgcaattgatggagactactctgttactatggctaaaattccatcaatatcgctaataataaatattgaaccaaaataaaaaccccctcaaaagggggctttttcgttattgctttacttaaaccatttttccatattgtccagacacataccgccgtttgccgccgtggatgacttcccaatagcctttagagttgtttgaacctttaacagaacctgagatgttaattgtcttgccgagaccaattgtatccacattcttggcgtttttacggtctggtttgtccataataatggctgcacttttaacaccaacaattttaattttgcctacagacttaatacccccgctagtcttgtttgaaggtttagcaggagcagattttgaagggttttttcctaactctgcatcgctcttgatatatcttacgttaacgtaaccgctgtatgtggctcctttagaattggtatatttaatgtaaccccaaccattttgagtcgatccttttttatattggacagtcgaacctttaggaagagcaagcacaatagacgagttggcattgcgttgagttctcacattaaggctgtcagcaacaactgtatttttaatataagattcttttgttttatcaacaggagaatttaccgttttagacggggcgccgctgatacctgctttaaaggagtcccatcgatcaagcagcttgcgcggacaatacttgccggaccagtgctggtgagggaccacgtttgcaagtgaaatcccctgctccttcatgagctttttgatcagccattgagcattcgccatggctttctcaaaatctccatcgctattctcacagatttcaatgccgatagatttccggttcccggttccgcggtttccgtctcccgcgtgccagccgttctcatttaatggcagatgctgataaatctctttgtcgtctactgtaaagtgccagctggtgggtgtttccggatttttctcataacgggcgtgcattgctgcgcttgccccttttgccgtgttcgccgtgttgtgaactgtgatgtatgccgggttcatcgcatatcccggtctgttattgtgtcccactggaataaagtcttttgtgattttcaccatgtttcatcgtctcctattctgttttgaaatataaaaaagcagcccggtttaaccagctgcctgatcgtctttttctgttttctgatcgttgccgctttcaattacgtgaagccggtcagtgatgacggccggaattttaacgccgatctgcgccaagttttctgtgatggacaggccctcatttgcaatataaaaaagaacggtcgcaaaggtcaggacgccgttcagatccataatcgtatcaatagcattcgccacaataaccacaaggaaactgagcatcttacgcacatagccgaaccatgcgctacgactccgaagctccttgaatttccatgcctttatcacaccggtaataatgtcaatgatgttcagcaccagcattaaatcaagatatttcacctccccaaaaagatatgctcttgcgatctgtaagctctcaaaattcatccacacgtatattccctccaattgttatcacctccttcgaggcaaaataaaaaacacctctccgggtgttgatcagtttgcggcgccgcctaaatccacactgacaggctgttttgacatcggataggttaagccggttatttgtttgtattcatcttctgtaagtcttccccactccacaaaacgggccacgtctgcattactgtaatactgcggcccccatccgtagatggttttaacgcttgtaaaccaatccatcatacccctttccctccctccgccagcattagataaagatttgcaatcatttgcgcttgtgactcggccaggctctgcgcttccgcaagctgcgttgtaatggccgcattctgagctttcaattcatcgacgggagaaggaacccgtccgctttcaatttgcttttccaaggattttttctcttcctctgtggccgcctccgtccatatcttctcagctggatgatacatcgcctttataaaagaaggaggctggaccattgtgcaattatcaggaattgtatagtttccttcttcatcaggctcaattggaacgggtttggtcaaaatgaaattttcatcgtactcataaacctgaatcatgctgtccctccttcctgaaagcccacgaccacatccagatagtagcctccacccatcttacttgagtccgccgggtccgggtattttattttcaagtctccatcatcataaatgattaaattggctgtgccgcctgtaccacttaacggcactgatataacggaaccgccagtaggtgcgtattccgcggggatggagccgaatataatttcggcgtctgttttcacatgcccccgtaagattaaaaacgccccccactttgcgtacatcggtgtccgcgtccctgcggcggctccgttcttcagcatgatgtttgcataggtggcagccccgttccatatcttccgttcagctgcagagatatgccgttcttggttgtaattatgagctttgaactgccgggtcatatcatcccaatacgcctgatcttcggccgtaacatgtatgtccgtgttattggcgtgcgtgtttaccttctcctgcgccccgctttctgtttctttactgtcccaagctttccgatcagctgcagaaacatgcttttcttgatcgttcgcatgggcgtctactttcttttgcgcgccggagggggtttccttggcattccacgcctttctttcggcagccgtaatatgcttttcttcatcattcgcatgttcatttgtataagccttggccttttcctctgcagcatccgcttttttctgcgcgccttctttcgtttcaatggcttccagatcggcaaatttcttttgtaattcctcgacagtctggctgatttcttcgacgatgcggtttatcccgtctctcagcgtttcaaaatcatcaatgtaataatcagctgtcggaacgatgttctgatcctctaacgttttggcgatagagaaagtaaaaaatgaagtcgccagcgcttggccgttcgtgtaatatagtttgatttccgccttaaccgttccgtaatgcttgagttctgcattggacaacacatattccgctgtgccgtttaccttgtcagtgatggtgaggctctttttataaaacgatccatcatcatacaggaggacaatttttgcgtctacggctgacagaggcaacggtacaccatcctttgtaaaagaaaaaaacagctttgcgctgccagtgtcttgcgtcataaattgtatatttgtactccggccattgattgggtttgtattaatgttgatcggcacgctgcccgttttatacatcgtcgcttatccctccttagtgctgcggcgtaaccatcatttgtgccacgccgtatcctttttctgcatcatacggtgtatctaatttcataaccgttccgtaaccgcctctttccgcctttgtagcgatgccgtcaactgctgaaacactgtcaccgacgttaacggtatcatcaacgcgcacgaacacttgaccaatcaaaccaataatatgccactcatctcgttcctctcgtggcttgtactcagcttctggatcatcgttcgggttctcagctggaatcgtaatgatgtcgtcaccgtcaaatacttcccggtagataatgccgccaaattcatcacgaagaaagcgatcattccaatagaaggcagctccgccaagcacaacgccggcagtcttggaaacgaccccgagtatcttgtcgccttcttgagcttttcggattttgtcgccctctaacgctacaagataagacgcctctatctttgttccgtcagctgattcaaaatactccgccaagtcttttaaattcgatacgctttctattgcgcctgtagccttgactgttccattctttgcgtttaattcaatttttttgttggcttctgaggctttgccgtttccatgacctaaagccattgtgtaagatttactattctttgtggccttcgagaacatgacacccgaggacggcccgtctcctgttgtatgagaatcgtatgaaaacatgacaccgttgcgtgagccttctgacgaagagccgccggcgtttcctgcaagcaggttgcgctcacctttcgcgtacgtcggccccgtacatgcaataatcgcactgtatttcgtaagtgcatggcccgagctggaagctgctcgaaagcctcccttgacgttattcggaacgactgaatgcttttcaccggcaaggacagccgcatctttataaccgtaagctctgacaagaaaaatattggtctgggtgttcggagaggtgatgccggccgttccgcttgctacatgcagaaggccatttaacaagttgacattatacacaccgccccctatcgcgatgccggttcttgcggaatcgtggataacaaaatcagaaataaatacatcgtcggtcatctgatcgccgccggtaatataaatgtcacaatcagcctttttaaatccggtaatgtgcaagttgtttactgttatcttcctgctcttatactggaaggcaatgattgccccgtctttgtagtcatatgtcggatcgccaatcgctttaaaaccgattatctgaacacgctggtacgccgatacaacaagggctttcggagctaatccttcataaagcgaattatagacgggttcccgggatgtgcaatctactaacgtcacatcgcgggccgtctcgctccaagggtcttttacaagatggtgatcaatatgccgtaaatcaaatgagcgaacgtcacgaaatgattcatgaccgcgaatatgaacgtcactcggtgccggccattccttgtgggcttttacttctacgccccgcacattcccctctgtataattatctataacccagacatgcttagagccgtcgtccacttcaattccgtttgaattggctccccctttacggtgtgcagtaccgcgggggttcgtcatcacattatttgtgatgaaaatatactcgctgtaatgggtcgtaatgccgtcgtcaccataccccgaaccgacacacttgtcgatccaaatatatttgctccccgttgccgtgtaatcttttgctgtaatgtcataagaaggcgctgatacatcaaaacaatgtaagccgggattaatgccttcaacgccgcgcgcaataccaaactttacttgtgcgaaaagaagacagcttgaatgtacacctccggttgcgcctactccgccctgacgatcaggattccagtcaagcgacataccttccacaacgatattccggttgcctttcgcatgatcagcatttgtgacaacccactcactggccggggtgtcttcgtgcagttttagcgtggtgacgcccatgccctggccgatcaaatatgtccatgacggcagctttacgccccttatcacgtattctccggctgatagattgagccgcacctttccgtttccgatcgctcttttgaatgcttctgtgctgtctgtctccccggtagggtcggccccgtagtcgtctacgttaacgtttctggtgatcttacatagaagtttgttatattccttatcaagacgctctttcaacagtggggcaatttccccatcagcagtaacacgggcatccactacttcttttacatttgtcccgtcggcattaagaatgagattacggacccggttatagagtccgtcaatataagttcgtaaagaaaagcccccgtgatcaatttgctcagatgtatgcgccgtagcagctttcttatgacgggtaatttcactttcaagtccgtttacgctactttcgatcgcttccatatcaccagatagctcatcctcataacgagagtttctagtggtatcgtaattttttttcaacctcaacactgtattcactctccttttcgacaaaataaaaaacgcccatcaaagcgctgtcagtatttgatcaatatatcgtttttgttctctcagcttcttcgcctgattcaccgcaatatcttgtatgtctttcctgaaattagcaaaagtcagcttcgggctgctgtatggatttagcggattgtattgaatcgttaagagccgcacatcatcctcataagtcgtgccgtctgctgtgtcggctaaaatgtggactgtatcgcctttccagaacggcttttcaattttgagcagtttcggttcgtatacatattgataatccacactgacgactgtttccggatatggattcacatgttttttcaacgcagaaaccatgctgcccgacttttttatagtttcgtctctgatcgggtcggcccacttcggtttaccttcccgcaggaatttcttttcctctggatggatgtataagatcggctcaaatacgtatttcggttttttgtctgtgctcttactgtctttagacattgcaccatatccccatgcacgggtagagcagttttgcgagttggttttgatactgatgcccggcatattataacgggagtcaaaagtgaaaggaatctctttccccattttcttatagacatgaattttataattatccacgtcaagctctaactcataatcatttatgagctgatctattaattcagtggagtttttatcaccgaaattctcttcttcggcggtggcgaatttgctttcaggctcttccagcacatatgaaaaatcagtaccttttaacgcaatgtcaaaggcctcttttacggtcagcttcttcgttactgtatcatccactcgattctcagcaagcagaacggtaaaaatatggttggccgtgattgtttttgtcaggacgtttttagcctgcttcaggtctacatctgtaatatagtatttttgttgtttgaatcttctttcatcaatgtaaagaatattgtcgttgaccagtaaatcgaattcagtcgcattgctctctgttttggtaattgtaaaggtaaagctctttttcccggtagtatcgtctgtaagatcaacgatcacgcctgttacttccacaacgtcatttccgtctttcgtggaaacatgcaactgtggaaagtccacatctgacggtaattttttattaagagggatgtcgttacccgcgtattctttgctcggaaaactcggttcctcttctgggttctccggggattctggatcatcaggctcattcggcaattctgatgtatcgtcatattgcatcaacttatactgttcgatcatggtaattaatttattagcatagttgatgtctgttgcatagccagctttttgaacggctcggcatgcttttttataatccgtttcccctaccactgctttataccgatcaagacgattatataagcttcccagatcggccaaactctcagcgtatgaagggtactttctgaatttagcttgtaccctctcaacatttccgaatttgtcctgctcgctggtccacatcaacacgtattttccgttataggtcccttttatcccaaacaaattgaaagcttgtttggaaaggccgctcgtgccgaacccactttccagacagccttgagcaatgacaaggctggcaaggacattatatttttttcgtaccttctgcgcccccggcactaggcttttaataaagtcagccgcagccatgtcatccctccttacttataataaaaacgagtatcgaataaaatttcaaagtcatttgagtttataatttcaaaatcgttccatcccacgtctagtgtcggcaggcgcccagatgttttcaggcgtttatccccaattacagtgtattgtctgatgaatgtgactttttgcgagcgttcaagctcctgctcaattttcaatttttccccgttcgttcggttcgcaatggttacgtttgtccctttggcccacagaaagacgttataatcatgctgcagagtgttgaccgcggcgccgcctggattgtatacactgaatcgttttttgttcttgaaatgatattcaaggtcatccctccgaaggattcccatgccgggactccagtgctctccattgaaattctggatggtggaagaggtatatttcgactcggcaagccccagaatgtccgtgaatcccactgtaaacgtggcatgatttttctgtttgtccttagtgatagtaaaattcccgtcacacgtaacaagaaaccgacggttaggcagaaggtccgttgaaatataataaggaaacggctgcactaacaatgaataaagttcatgcctgttctgataaaaggtttcgggaatgatggaatctaataaaaaatcaaccttgatgtctctctctttgtagacaacgtcccgggggtgctgcggcagcactaaaccgttaatccttgggagggttgttgtttctcgttcaatattcggtgagtctggcgtgaagctgcgcaccttaaaacgggggagaatgcctgttaaactttgttcccccatcccgttattaaaatcaatatataaatctagcattatgatctgacaccgcctttataggcattctggttgtatcggtctgcagctttctgatcaagtatcctgccatctcctttttcaaaagcgatcgtcgcaatttgttggccgtccatatgcaccgcagccggatggatgataataggctgctgaggtatcgcggcctggcctggccccccagactgttgctgagacaggagtgtaattagagcatcaagcttttggtttaatgcaggcgtgtcaacttcatttcgaataataagctctgacttcattgaaatgagctgatcagcagcaccctttatgttgaaagccatctgatttaattcctgcttaaacgaggtcatcgcgttttgcgccataaaagcagcactttgttttacgtttttggctttgtcctctatccctaacgcaaacccatcagaaaagttgtttccttccgcttttgttagtttggagggagaatgagagtcaattgatttctttaaagtccgcaaggctgatttccccaagttccatgctgcgctgaagagagagccgttttgcgatcccattccatttataaagccggttacaaagtcagaaccgacactttgtgtcttaacgcttttcagccctgtttttgcgctgtttgcaacactttttccggcgctgtttgctgtaccttttttactgagaacgccgctggctaattcagttccggcctttttaccgcctccgccgtctgaggttttggctaaattgttcgttactgatgagctaagagagccggccgcagatgtattggcgcctttggtagacgttaaaccagctttatgcttatttcctttgttttgccctgctgcatttgcttgcccgccgcctttcctcatctcgcttaaagcagattgaagtatagacgatcctgcctgtgcattaccggactttgtagaattgataccggtacgaaaggcatttcctttattctgtccggcctgtgcgggcgtggcattatctgcagaaagcgaattgttaagggcttgctgtaggaccgtacccccaccaatcactgctggtgtggactgcttcaagccagcggaaaagtcctcagcgaccttcttccctgattgcccggcgcttgtcggcttatctaattccccttcaacattagcaaccatctgacttgcttcttcacgggcttgttcttgggtcatccccataccttggtaaaactcttctaaagcctgttgggttgtctcaatcgctttttctttggactgccctaatttttgaagaaaatctatttgacgggctgcccatcgttcttgaaattgagcttctgactcttcagttttgaccataatccccattgaattagatataaactcatcttgtttatccaatgcctttccggtctctaaatcaagtagcttgccgtctcgtgacattttggaaaataaggctcttgaatttttttcataggaatccgtgttttttgctaatgcggtattatagtcggccgtgcttttgctcagtaatgatcttctttgttccgcctctatatatccctgcgcaaacaatttctcaataacatcatttctgtattccatatctttcttggcggcttttttaccatcgtcatagacttttttaatgtcattgttgtacttctgagcttgtttaaatgaaagctgcccttgctgatccgttactactttttgcattgctaaggcttctttttgattggccgcaaatttacttgtagacaactcaaaataagaaacaatgtcattgaactgcttcttttgtgaggcattcatattagaggagacaaggcctgtctctttttgcagagcatttaactgtttcagtttatttctagcctcttgcatatctttatcaattgcgccgaccatcttgtcagtcatcttttcgccggctttttttgttttctcatcggtgtccgcatatagccctttcaagacaaccagagcatcctttttaagtccttcaagttcttgtatcaactggtcgcgcatgctggcatatgtttcaactaatttagctgacatcttttgagcttctgaaccagatacccgcgtcaattcaaacagctgcagttctgccttttcccttaattccacataggcggaagcagatttttgtgttgctttagaaacgccatcgccgtaaagcaaggcggattcccgcgcctcttcttgctgctttttctggttcttcaattgttcagtgtaagcgtaagtagcaactgaaatgccgccaagcagcgctgtacctccgacaatcgcaaggccaacaggaccggtaaacgctaaaagcgcccctattccagctgtaagcgtggcgacggctgtcgtaacccctaatacacctgtcgccagaacggctgttttcgctatggtttgcacggtgccggaatccagattattaaacatcataatcaagtcgctgcccttgtttgctaaatcgcccagggcaggcaaaaggctttccgtcagtttgatttttgccccttcaagtgctgactgaaaagctactatgcttccgtgtgcattatccagcattgtatccgccatctttttagcggctccatctgatttttcaagcgccttagtattatccccaagagcctttgaacctttttgaagaaggacagcccaatgtttatatgcttcagcgcccacgatcgtttttaatgcggccgcctgttgctctttggtcatgcctttcagacctttttccatttcctcaacgacttccggcatgcttttcatgtttccggctgcatcgaaaaaatcaaaacctaattttttgacaagcttcgaagccttaccggttggtgaagcgagacggatcaaggatgtaccaaaagcctgcccggcaattgaaccctggagacctgcgtcaccaaaagccataatggcggccgctgattcttccattccccaaccaagagaattagcgttcggcgccaaaaacttcatggcttcgcccatctgttcaacattggtatttgcattggctgcggcgtaagcaatgacatccgaggcgtgccctgactcttttgcttttagagcaaaggcagacatgatatttgatgtaatatccgcggccattcctaattccagttgaccggccgccgccagactgagcattcccggcattgcgtcataaatgtcattcaccttaaatccggccattgccaaaaaaccctgtgcatccgctgcctgacttgctgtgaagacagtggttgcaccgagttcttttgcttgctctctcaatttcgcgatttctgccgccgatccgccggaaatggcctggaccttactcatttgcttttcaaagtcaataccgacctgaacagcatcacgtagggacagagccaacgcaccaaaggcgatgcccgatgtcatagctactgacgaaccaacggagcgcatttttccgcctattgaatccattcgttcgcccatgatccggatgcgggaggacgctcttttcgccgcctcctctaacgcttttatcctctgagtcgtactatttagcgcgttttgtgtcttgttcatctgcgctgtggcattatttaaacggcgggcgagggtttgcgtttcctttgcatctttgccttttttaatcgctgaatctgcatatgctctctcaagagcctttactttgcgtttatgattttcaagctcctgagtaagagatttttcggttacttgtgcagtttttaatgcgtttccccacacacccacggccgtacggtttttttcaaattccgattttaaatttttcatttgaacagcacaggcgctcatttcttttttaaactcagatgaattcgaatacagcctgacctttatgtctttgctcaatcgggcacctccttatccgagaaattgatcaatatacataggttcatcattgttttttgccttcgtttgtgtcttctcttgtgattttctccgagccagtcttttcagatgatagacaatgtccatttcgtcaatttgattctgtgtatatccgacttcctcaagggcgttatacatatcaaggactgactcggacagacttactcccccggctcttcaccgttggaaatttctccgctatttaaaagggccgttgcttctgcaatattccccaacacatactgtgcagcagcatagattgttcttcctaccagccgggcatcaattcctttttcaaactcatcaggcgtgaatttctggccaaaggtattacagacaaattcaacctgttcattagtaaaaagacgctctgaatcttgtgattcaaaatcgtcagcaatctttgcagccttccggaataataaacctgtaatgtggtcaggtgtaacaaattttttatctttgccgtcaagtcgaagtgtaatagacaatgcttccatgtaagttcctcctttttcatataaaaagagcgctcttaggcgctcaatgaattatttaccgacatcaacaacaggcgttccctctttcgtgatgtccttatagacaacttgtttgaaccatgtttcagcattaatcccattggccttatcttcttctgcttttgcatcccatctgcgcttaccctcttttacattagtaagaggcatgaatttaattttgacctgcgctgtttggggcgtagctttcccttcgtccgttttgtgttcaaccggtactaattctggggttcctttaagcacccaatagtatctgtacccaccggtagagagcttggcccggaaaccaagagcaatctctagtgtcttatcatcagcactagaaaaatgaatgccattctccacttgcttaccgaaaatccttgactgcatgtcaagaggaaggtcggcaacttccatttcaccatcaatatcacctaaactatttacagtggcatatgccacgttgtcggcataaaaaacctcctgttctgatttaggatcaatttttaagttaacggcacccggtatttcttcgggaacagaaaattttaattcatcttttgtgtcttttaatacttctgcgatatgaaacatatccaaaccggataatactttccccatctatttcccctcctgataataggtttttttataacgtctggccttatgaaagacctttgtgtctgtttcgtataaatcttgagaatcataccggctgtagccgatttctcgcataagcctgtctatttcggcagcaatcgctgtttccttgccgcgggtgctcgcttgagtgaaaatactgatttgataacgcacctcaaatgaatagacctcgttgtctgcaaaatccgcatcagcatcttgaatctccgaaaaaactactctcggaaatgcgctgacatcattcgcaacgaggttatgaattccgccagatgtaaggccttttaataaggcactggaattaagtgtgctcaccaattcatttttaggagagtagatcatttgatcggcgctgtaagtattcgctccattaattccacagcagggccctccccttcttttccacctttttctatgaacggttgcggcggcatttttgaggttccccactccaagaacctcccgcgatacgctacctttttattcggaccaacggccacaaacctcactccgtccttggattctctgacattggagactgtgatgttgtcctgcatatgaggttgttttttatcactccggttaacgtgggagcgttgccgttcagcgataatttcaccgccggcctttagcgctacaggttccaccttttcaatgtctccgccgattttttcaaaatactgcgttagatcatctataccatcaaagctcatatcagccattgattcccacctcctgacaaagaatctcaagctcttccccttgatcatccggatcgttagtgtccaaaatatcaaaaacgcgttccgtcttttctttaggaacgcgcttaacaatccgcatattcggttttatatccttccggtaacgcaccgtgatttttttaggggtcttgactcccaatgctccggcaatcatagtttcgctatttccgagagagccagccccctctacagctccccagacagtgaataagtccacataggttgcattccagttaccttcttcatcctgtgtctcggttttcttttgaaaggtcagacggtgccggagttggctgatcttttttctcattttctagttcctccacagatacataacgcagctgcgtcaatatattttcagcagtaaaagggatagataagccggttcccccggactcatatatccctttgttttcataccaatgttggacaagcatttgaagcaccagctcaaattgcgggtgcccttcaatataccggcctatcccgttgataatatagcttttggccgccgccatttgattcaaaagctgatgatcatcttcttcatgctcgacttttaaataatttttaatagcctctaaatccattcaggacacaccgccttattctgtcggttcttcttctgctcctttcaaagcagccaggtcactttcaaggttattcattttttgtttcaattcatcaagcacttttgtaatttcgctgtttaggtgctccggcatcacgcttccagttccgatgtttttactccgaacggatttttctgcaagcatttcatacgtaatgcttccctcttcaataacagccggatcacctttgtctcccttctcaccttggggtccttgctcacctgtatctccttttggtccggccggtcccggttcaccgggttcgcccttatcgccttttggtccctgcgggccagtttcacccggttctccttgaggaccttgtttaccggtatcgcctttgtctcctttctcccctttttcaccctgcaacccttttacaaaaagaggattttcttcgctgttttctttgagatagactggcgttatcgccttgccgtcttttcctttttcagatgaagttttgactccgttactttcatataaataatcttcagccattgtaatcatccttttccttttattttttattccgtttttccgtcagactgggaactggcaagctctttcaatttatcttcaatagccttgagacgatctaaaatagatgaatttaagtgttcttccattacactgccggtgccgatattcctgctgcggaccgacttatccgccagcatttcattggttatgcttccgggtcctggttcagcttggttgccgccgtctaaactgacctcttgtccatctttaataaccttgcccccggcaatttctaaaacaccgccgatgacggtacgatttcccccgtcggcagtgtagtttttagttactcgcatgataaccctcctttattactcagcagacaacgtcaattgaccgtacactacagcctcagaatcccacaacttcacgtcttcacgctcaattgcgcgcactttagttgtatttgtctcaaatgcaccggctccgacatcagtagaggcaattgattgttgctgacggtcaaataaaacgatagcctccttcaagtcaccaataatcattggcgcttttccagagactgttttgaggactttattcgagataaccacgacacgacggccgaaaagcattttgtttgttggttcagttggaatgtcttttaacagatactttccatcgccgtctttgagttgatcaagataatcaaatccgtcttggttcgtcatgataatagctccggcagagatagcaggatcaagggtcacgttaagtgtctttttaatgttatccaagcctttgaattgaacctttttcaaagaatcaaggattgaaagaattaaagcattccgcgtcgtgattgatttcttcacaaaccatcttgcgacataagacataatagcctggtcagtatcttgtaaaagtgtattcgataaaggcaggatgcccgcataatcagtaatgttgtaagaaagcttggtaaacttcggttgatctgtctctgcaatttcgtccatttcttctaagaccgcaaacggcgtcatgtcactgtttttctcaagcatacgtgtacctgaacgggtcgcaactggctcaaccgttacatattgttcaagctgttgctcttgttcccgtttcaattccttgatcgttctcgaaatatcttccggaattagaatgccgccgtcttcttcatttttaccggacatcgcacgaaactcttcactttcaaacagatcgcgctcttcctccgttaagcgtttgccgcggagggatttcatgaaagcttgagtgaacattttttgtcgttcttcttttgcccctgtatcgccggccctgccttctgggttgcgctcttgctcgggcacaaagtttacaccgcccggtaaatccgggacatcaagtgaacgtccttcggtcatcaattcgatttgatttttaagctgtttcacttcatcaagcaatgcacgcgcttcatcggtattgccctcctgcagcgccttgtctgcttgctgcttcttttcagtaaactgttgtcttaatgcgatttcttttttgctcatttgcattggcataaaatcatttcctccttgtttttctgcactaaaaaagaccttactccgggagtacaaggcctaatagttccaattccatttttaacgcttcatctgatgaattacgtctttctttcagctgctcaaccttttctaaactgcgggcacctacaaccgcctcagtatcgctgtaagcaggcgtagtgacgagtgaaatatcgaaaatgcgattgattttattgattcgtcgctcgtaaatgtcctcatcttcattgatacgccattcatctgcctcagcatccccataatcaagtgaaaaagcaaaagagcattgattgataacaccgctccggacattctttattaaatcacgcgcatatgacgtgtctgagggcttaaatcggaatttgaggcctattccgtctatttctaattcaagacggccagtatcctcggaaacggtatttctcgctaagggaaaatcttgcttatgattaaaaagggcgatgacgttagacatgtcagctgagtcaagggccgttctgctgattatctctttaaaccatcctaagcgttctgaccatttttcgaatttgagagcgtacccttcgatatattcactctgcccctcaccttcggaacgcagctcaatcggcgtcgtcaaatgccgaacctctttatccttcattcttgttgtcaccccccttcatggcgccgccagctttaagccgctgatattcttccacaaaatcgaggaacacatagtttaagctggagatatatttatcaccgttttcaatagggtttcgttcaagcaattctctgatttcgtctttattcagcactcctgtttcatgaagtgttttcaaatactccgcttgcgtcttactgtcgccgcgcagctcgctgtctatattgaatttcacgtaatggccgcttttctgatcgtgatctaagaacaatttaacgtttagttcttgttcaaaattcacaatccatggctgcagcgtgtttctgacatattcaatggactgatgctcaatatttgaaaatgtcgctttatccaattcgttcagcttatgcaacggcactttataaatcatggaaatctgtgctttgttaaacttcatagactcaacaaattgagcttcttgcagaggcatggaaatagattgatattccagtccgttatctataatggcgatattttcaccttgattcacccgtttccactctttgcgcacgttctcttttggtttttcatccaggaacgccggaactttcaatatcccccgaggagttgcctcgttcttgtacagtttggcgttatattttgtggcagccgcttgcgccccgatatgctcccgcacaacgccaataggtgatttaccatgtattccgtcagtcgaaagccctttaaaatgcagtacctcgtagtcatataattcaatggctttcccgtttaacacagtttgataccacagcatgcctgttgttggatgaacgtaagcattcgtgtaatcagggcgcaagggaaagagcgcttccggataaccatgtggtccgaattgaatataggaatatgcattcccccaagtcagaacatgagtcatcatgagctttttccatgtgaaagctgtcatgtaaggattcggccgagcataaacagcatgcgcggacatgtgctcgggtttccgctcaatgccgccgtccgttcttttatatgtgtgaatcggcagtttcgcaatgtcatccgataatacattgacacatgcaaatatgtccggctgcacaagtgagttgctttcactcactctttcgccgcttgctgttttccggccgccgaacatgtttaataaaatgttgttaaaaccatcttcatgatctgacgagccagaacgtttctcaaacattcgttcaagcagcatttatatcacctcgctttctttgatatgaggtatgcataaaacattaaaaagacacccgtcagaatcagaccgatgttggtgctccatctatagacagctgtcaggataaaggcggctcccgccataaacagcagatcatttattatcaagcagaaaaaagaaagcagggctttcaaatacttggggtgaaaaaaccacttaaaagaagctttgatctttttcctgacttttttcattttctcacatcctaaaaactgaaattcccagagccgaagtgattatttaaatctactctatggtttgtgtcgtgatacatcgctctggcgtaagcatttataacagccgcaatagggtcgattctctgcggtgattttgctttatccaacatgatattctcttgcgggtccattttcgtaattgcgttattaattgcccatgttaaaaccggatcatcgccatgcacgactttcctttcaaataccttttctcgaaagctttttgttggtaatgaaagatgattgattctctgcggcagttccaccattgtatgcccttttgattcaagccgctgcgctaaatgaagagcattccacttgtcatatgctgtctcttgtagccgaaaacggtttttatgaataaattcaatgatccattgttcaactaattgatagtcaactgcttcgccagatgtataagtgataaatcccatctctctccacaaatcatatggcactttatccgtcgccattttttctttggctcgggcttcaggcataaaggaatgttgaccgacatagaaaaagccgtcttgcatggccacatatccaacggaagttaagtctgttgtcattgataaatcaaggcccaaataaacgggcagtccttgcagatcaggaatttccccgctgcaagcgcgccattttgtcatcttcatataaccattgtccttctggtcaacccatcggttcatatttttggtgaggaaactgcgcatcttttcaggcacttcaagagccacttttaaagcagaacgtaatgactccatcccctcggggtatgttgccacaatcggattcgccttgatccagtttgattcatcttttatgtcatcttccgggtccagttcacagatcataacaaaataatcatcattctccgtgtcaatgtctggatcaagaattttactcgtatattgatattccttaaagcatggccgctccatgttgaaacccgctgtcgtaataacagccattaacggactgcgccgggcgaccatcccgctgtccaggacatcgtaaatctcacttgtttcatgtgcgtggtattcatccacaattcccaatgatgggtttttaccatccccgagcttccgggcctcacgggaaagaggctggataatggagtttgttttatattttttcacgcggccattagcagaggtgtatttccctttgagtatcggcgcgtgatgcagctgctcaagaattgcttgatatacttcatctgattgttcgcgggaccagcctgcgataaatacccggtgtttttcttgtgtcgggaaaatctcatatgacgctattaaagctaaaaattgcgatttcgcatttttacgtgccagctggatataagctttccggaaccggcgggcgccattttcttttttatagaatccgtatatattggccgcaataaaaagctgaaagtctgttagttcaatcggctgccctgcaagtataccttcgacatgattaaattgccgcgaccattcataaaaatctacaacagcttcagcatcaaagtaataagggcagtcatcttctgcgagccggtcaacatctttaaaaaatcgctctacagcccatttttgctttttgcctgccttaatttccccggaacgaattttctcagcatatgaccaaacccgctcaatgagaatttcagcagttatctcttgcattacacgcggcccccgaaccgttcttcctctttagttttctgttttccgtcatcttttttcgggatgacaagtttacaacgagaggaaatggttaaccccaaatcactggaagcttgcctgcattgtttaaaaagcttgtcctgattgattaaaagatcggaatagtcatcattcggaacaattttttcttcttctcctattacatttccgtcatcatccaattttctaatgatcactgttttcattggtcctcgttcaagcaactgctccgttacttgcagatataattttcgagcaaacaaaaaacgggcgagcgcatcaacatctaaattagtcataattccgatgtttttaagctcatccgctatctttttaaactctctttttaagtcttttggcaaatatgatggagctttcaccttgtcgctcggcgcctttatttcttgttccctgcgttcctcaatctcttgctttgtcaagtttttcttgcctttataaagtaacaagtccacaggttgacgcggtctggccattccctcacctccttccgatttttcatttagggaatttatcaaaatggggaggggagcgcggtctctggcaaacgtcctctagggatttaagggtggggggtctccatctccttcttcagctggctcatggctgcttgtatttccgtttgtgctgcttctatcttctttgaatatagatcaacagctgattcctttttcatgttacgacgaagagcaaacatctttcttattctgtgttgcattcgtctgatgttctcgttcgtatagaaggatgtatactcagccttgcagcgtggacacttgatataatgctctttgattccgttgttgtgcttcctgacctttgaacagcctttgataagcagtctggtcatgcattgatcacacacgcacgtttgatgttctgttcccaaatcctccgtcctcctttgccgtcttccggctatggcacggcccgcagagaggctgccagttacccgagtcccagaatagttttttgtcgcctttatgcggaacgatatgatcgacaactgtcgccggggttcttctgccttgcattaagcaggcggcacacaacggatgtttggacaggtagccagcgcgcgactgcctccacttgccgttatacccccgtttggcagcagactcccggtattgatcataggccggcttggttcgcttatgctgttcgcagtagccctctcgcgttaggtcgggacagccgggttcattgcagggccttagagctttcttcattagtgaagcacctcaaaaggagaaggtggtatcggatgtccaaatttcttgatagcttcatcaacaagctctcttctctcagcaatgcgcttttcaataacagatactttcttctttgcgctttttaaatctttctctaattcaggaagttctttgtctacaatgttgtttacattttcatgaatggctttagttaatagacttcgtttcctcccatctcttaactccccttgttcatcagtgttttgttctgaagttagaccgggattggcctttaatacgaatcctgttaataatttcccgagtcgctgtagccccttgataatatcgagaggcactccctcatcacaaacaatattggttaatccatctaaagcaacttcatctgtataactgatgattctcacatccggattctttttctgataatcataagcaatcctattcatcaggatagtgcagttattttctcttgcaaattgaatcagcgatgttgtttttcctaagcgcctttggcccgatcttacataaataatctcattgttctctgctgccttttccaataactcagaaatgctcatacatgatagattcaactcaaatgccatctatttgatcctcctttaatagttccagtctttcgtcacgattagaagtttctgcccaattattaaactcctgaattcctatattgacgcgttgcaggtgcaactgcttttgtttctcgttcaattcgattttcctttgactgatttcaatgtcataattaatctgtttcaaaagaagctcttgttcagtgcgccacgctttaaattgatcgacatataaattatcttcggtcatggttaatccctccaatagaaaaagcgccctcccgattgggaaagcgcttggtatattctttctaaactgcccccgcactcaaaccgttaaccgccgattgttctccctgagatttaccggacgcagtttacagagaatataaaaagtctttccaagtggaaagacttagtgtgatatttcatttgtgttatcctcatcagtttctagtttttctttctttacatcctctttaaaaatagagtcggccaaaggtctatattcttttcgaactaaaatatccaaaaaatatctgtgaccatatttatttaaaatagcttcaacaaatttactccacttaaacttgaagaaaaaacgcaaatataaatatatgtgcttcctataaagaatattcttcttgaaattatgtttttctctcaaaaactgaatggcaggttcctttccatacatattcgttataatcctaagaagaaaatacatagtacgatacttttttatttctctcttagacttcctgtcaaaaggcgctatttttattaattcattcagaatttcttcaaataggatgaattgcgcaagatccacacttattcctgataagtcgtctatgtattcaaattgcttcagtttattgtatgcattaattattttaggagatgcatactttaaatttttaatgatatgttcatttatctcattcaataattttttttcatcaataggatgtttatctttcataatgcccttattaaactctgtaatatagtcgcaatatgtgtacatttcgggcaaaataggtgcatatagttcattgtaaaaaactcgctgattactctttctttctctttttaaaacgagcctatgagaaaaatactgtgcaacacaagcaccaatgaaggccccaatcaaagtagtagcagaagttaaaaatgcaggctgcatttgtaccggtatattggtttttatccaatttgctatccaatttgctatccaacttgctatccaacttaaatccatttgtagtccctcccaccttattatcggtaaaaggtgggaacaatggaaccatttacgaaatttgtcgaacgattagttattaaactggatcataacctcttatgctgtaacaaatttcgccgtgcttgttgtattcattctttaaagagggttcttcttttgttgactcgacttctaatatttgaccagcgttaagaatttgtttgattttgtccagagccgcttccttgcaatgtgtgtctcgcattactaaattcttcaatgaaatccctccaatagaaaaagcgctctcccgattgggaaagcgcctgcctgtttattacctattaccataataccttatctaaaacaaaatggtgtgccgttattctgccgttattctgccaaaatcttttttagcaatttcaagttcgcgtttcagtttattgataaggttgttctgttcgtcaatgatttctgcttgttggtttgtcaaatatttaataccttttaccgcagaaataaaatgaccatcttttacgagtttaagagtcgatatttcttttaaatcactcgtgtcatgaatatataatgattccattgtatgtttttcgaagttgtatctaatcaacctatcttcatcttcatcaaatccaagaataggtcccttaaaagattgcttcgtaatggtctcatggtagaatggcaaacgattctcataaaaccatctaaaaacttcattgttttcttcaataagtttatcaattaattctgcttgctctctttgtaaacttttgatttcagctgtattagagtttactttttctaattctttttctaattgaataattgtttcaactgttttactccccatttacttccctccaaaaatattaaacgttgttttgtcaaaccatgcctttctcttctaacgctgaacctgttgcgcctctactcattccgctcacctcctgtaacacgatgataccacgaaaaacgcccaaattttccatttatccacacaatccacgaattactcatatcttatatactgtgcaactgcctgaagtgccgtcagcccttgccacccttgttttcaagcaatatccctaaaatgaattccacgtatgctttttgaagggaatcaatagaaatatgcagaaaaaaagactcatcttgtttatatgatgagcctgcttatattttaaatttcttcatggcgttgttcatggcatcctgattgattccgatgtatcgaagggttgtccgctggtctgagtgattaaaaatctcctgtagcatggcaacgtcttttgtttgcctgtaaaaatggtatccgaatgttttcctcagcgtgtgtgtgcctatatcatccaaaccgacatactcagcagcagcccttaaaatcttataagccatcgaccgggaaatgggcttattgatcccttcgcggcttttgaaaagatattcatgatcttctttcccctcgatatacgcttttaattccctttgaagagccggcgtcatgtcaattctctttttctttttggttttcttctctataagattgaaatacggacgcttggcgtctcttactctcagttccagtatatctgatatgcgaagccctgagtttatcccggttacaaatagcatgtgattccgctcgctctgttcttttagaaaccgtttgatatagaaaatgcattccgggtcccttatcggctgaacaaaattcattccggcgcgcccccgtccttatagacttccacgcgaagagcaaaggctagccggtaaaatgcttttgctttcgtccggtagtagctccgctgactgagtctcatttctgcatagacttcataatcatacatttcttcattctgcatgtagagcatgacgagaatttgccgctccttttgtgaaagccggttaaccgctccttgtattctctttaaaaaccggtccctttcaatctcccaatccatgcgttttaatgctgcgtcttcggtggaagaatgaaatccattcgaaaagctgggcggaacaaggctgtatgttgcggtcactttcggcaaaaaatcctccggcacttgtaacaagtacatgcgatattgttcgagcagcttttctgctttcattctcgttgcttcttcgtcaatttgaggaatatttaatgtcaattgattcatttctttcccccctatgcacctttaatatttgaattaatgtatcttgcaatcttcattcgtgaacggttaattgttgtttgaacagttccttttgcaataccgagcagtgcactaatacattcataagaaaatccttctacaatatgcaaaagaaaaatttccttttcgcgattcgtaagtttgccgagacaatcattaattattttctgctcttcctccgtaactgatccggtttgctctggcagaatagaaaaatcatttgagaagacttccattatcttaggatcaatgaacatagtcctttgatatgaggctctgcgatctattgagcgacgtgacacgggttgcctcccactttcaagccagtcgattgtccattggagatcagaaatcatatttctgagattctttttatctctcataccagcagcagaaaggtcgctttcatttgcttccgcaagtggcttatacattgctcttgtttgttttagtgtacttttatagctgaaaagtaaatctctcacaatgatccccctcttatttacgctttaacgccccgcctttgcctcttttaagtgtttgcctgtcttgtcccatcatttgccgccaaaagcgctctgatcgctcctgagcgtttttattgggcttttccttcctcttcttcatgccgtccctccgttcaaataaaaaacggacaccaatcagagcacagtgattctgtgcaatgatcagtgtccgcaggctctccgtcttggacatattgatttttgattacttcacgtaaaaatttgatggtcggtgtggctcattccgcgccctcctttttaagattaaaacctaataaaaatgcagtggaataaatcgtttgagctgaattaaggttcatatagtaatcgcccatatcttctattgattcggaagcaggtggattatttttcaaattgttatatgtcgcttgtagtgtctcttcttttctgtctaaagtctgaatagcggcctccagatagactgcaagatcaagagtttcctcaagtgcatgctgcaaccagccgcgcagatcataggcattaacttggacgggctggccgtacttggcaagccccttgtcctgttgtgcgtttagtttgctgatgacggctgaaatgatcgggttgtcagcgtggttcatcaatacccctcctgctgccgctgatgattgacggcgtttttgtccatgtaagctgcttcgatctgttcaggcgcgaacccaagcaatttgcctaaattcaaaaagcgctcaaaagacattacataagtccactcgtcttcaatcgaaaaatagaaaccatatacaagtgacattaaatgtgaaaatgcttttccaataccgatatttgtttctaattccctttcttctgcccgtctcatgatctgctgaatcgtagcgccattatcaaatccaattctattgccaatgctcaagataaaatgcaggcagtccacgtattcctcaagcagtgggtttgtatcacgaaaagccgttacatcacccactttgcaaattggacactcctcataatcaggatcgaataagttttcaaaatcttttttgcttaaatgctctccgcaattatcattttcacaccggaaaaaggatgcattttcaggagtcgcaccaacatttgttgatacttttgttcttggcttttggttattactccaatgcttaaagccgcgccattcattcgcacactcggccagctccacttgtaaagcgagaatgaggttcggcagcaagtcctgtccctcaagccccttttctttgatgatccgatcgtcaagcaccttttgcatttcaaacattttttgtagattcattgtttccgctcccttatttccgcccgccgacggtattttgaagaaattcatgtacatgacacatcagcagcatgccgcctgtttctggtccgtacttttcacggaagacagccaatgcttgttcaaaagcctgcctgtaatcctgtttcactatctcaccccatcaatcccggcagcacggagatagtgaagaagatgagccccacgcaagccccgaccagccagatatttgttttatcccgtttagcgataatggtatgatcgccaatcattttcagatcgtcagaccgagcgacaagcgtcgggatgtagtccgggtgaacctttaaaagctcggccgcctgctcgacggtcattgcttcgtccttcgtagccttcacgttccgttgcagttctacttgtaatggcatcattccgcagccccctccaatgcttcaactttaccttccaattcctctataacgtcctctaaattgctgttttccaattctaaatctcttatttcttcttcctgtgcctcgacttttgattttagttcttgcttctccacctgcagcaacttaatatctttctgtgcctgccggaattgattggccgcaatatcttgctggcgctggtgttcccgattcatagcctgttgcatgattaactcttccgcgagcttttcggctgctgcttctaaagatatttgctccggtgtactggccgccgttttcgaaagggtgcaaatgtaagagccggtatataaaacctcaccttttgacaagttgattttgaattctttcatgcccgggcctcccggtctaaaagacatgttttgcatacaacccattgagctgaataatatatttttccgcagcgttcacacttgcgggcaatctcgttttgatacattttccgttcctcccccgcaggggaaaacccctgctaattgaatttatggccgatctcgtaatcacaacgagccaggccgccttttactgtttgaatgattgttttgccgtgttcgggtgcctcaacgacatacgcggcgttttggttgccgtctaacacgatgacagacaccttccccggctcaataaattgagaaatacctgtattttgattgattggtatatgttttggctgcatgttcaaagcctccgtatggtataataaaagtgtctaggttttattattcatacggtggcggttgctttagcggccgtccttacatccaatagtttgacgggaatagttgtatgccaacctttggtttttccgtcggaatgattgggtgtttttttatatactcaaggcgttcctcttcgctcatcacccgcgttgtaacttcgccgtgctgacgcaagtttttgttttctgtcatgatgctgtcctcctattctttgttcatgcctttgatttgaagattatataagcgctcaagctcttcatctgtctggcggtttaaaaaatctctgccataagagccgataagcaaaagccattccattaaatgctttcgttctgcctgtcccaaacgtctgccactcccttcataatcagcatttgtaaagccgcgttccttacctctggggtacagtcttcatatcgcacgatgaccataagttgctggacggttgctttttcaaaacggaagcttttgcttgttgcgttcatcttctgacgcttcctttccgagcaagccggattcccgaggctcaatgaggtctctttttgcttggtcgatgataaggaataacgtttcatcttcattccgtttcagctcttttgctatgttgaggtaagactcatctgccgcccacagctcccggaaacgcctgatttcactgtcataaaacatgaagtttaggtcctgaaaagggatatacaccgggctttcttcaaacaaatagcgtagtcggaacattttatctttcatggttttctcggatattctaattcttttgttagcgcgtaaaccgttcttacgggcgggcaggatgttttttcttgcaaagtccatgaccagcaaaatgatttcatccgaatccctgtttaataattccgacatatcaagaattgatttcccatcatgccagtattgaactacctttttcagctggaccattgaccattcataattcatatcctccaaagccagttcgaaccgttcggcattgaccgcctgactcatgctaaacactcctttttgtaattcatatagcggtgaacaagtatgaggcggtgttcatgctgcagattcttcgttacaagccagttgtttggatttaagccgtttgccttaataacatttttctgtgcgcgagtcgggcgcttcccgtgtttcacactgcattccccctaaagttctgatagtctgctattttttgatcaagaatcttgataagctcgtctatttcttttttgcgctggtcatccgttaatttgcgttcagggacgatctgcagcacgccgggcatgattgcctgtatcaactgttttcacctccttaaaaggacagggcgggcgcagtacggccttttctttccttctgcttctcttcgaatttgactgtttccaagtgtgccgtgagccgacttacgactttcttgtcataaagtttagtcagagccacgccggatagattagttgtaacgatcgtgaatttgccttgccgccctgtagagacgccgtaccatacgcgatgaataaaatcatttgccgccctgttttcgttgtctgtgtcgcccacctcggccccgagatcgtcaatgacaagataatcaacccttgtcagcagttcgatcgcaaaagcttcggtaagcctttcagagctgtccttgaatgagttctttattcgcctcataagggcgtcactgtttacaaacaacgctgatttagcgtatccttctgcgtccctcttgttcagctctttaatggctgacatagcgagatggctttttcctgcgttagattcacccgttaagaagacattcatgatggctcccgccttcacttgcttaacaagctccatcatccggcgcttgttccgctcgtcttcatggttataactttggaatgtcgagaacgtcgcttctttgagtgtgggatcagcgattagtgaatacatagataaaaccttttgatccatccggcggcgccattcctcggtttcatgctcaatctccttattgcgctgttcccgttcgcacatgggacactttgcagagccatcccgaagtttaatgagctgaactggatacggcttttcttctccaccgataatccgggtgtgtttatcgcagtaaacaggattgccgtgctcatcagtatggaatgtcatcctccgagatatttcgccctggactgcggccgcttgttcctttgtaaaatccttcattcgctgatcctcctttttgatttaggtaagattcaaattttgtaccgaacaatgtttcagggcgcaaaaatctattcatagcaggatcattgagccattcctcagtttttactagaatgacatgtttaaaatcttcaaagcgaaaaccttcgttccagcgtgccttgatgtctttttttgtttttggtgtagtaggtcggtatcgtttgcccgctactttgttcagcaaatcaatgatcagtttgtaaggaatctcgtccttttcgtttttggaagaagatgcgtcgtcgggtttacccgacaatatatcttttaattcttctttcttctttcttctttcttcttcttgttcgttaccttgcgttactgtaacgttacaggtaacgttacttggttgtgaaagctgcaaagccctttgcttttcccggtatttagcaactcttttgcgggtatcttccctgattttatccatcgcatctacgttttgatgtttttcccaattgcaaatactgatataattctgatcgttaatctcaatcattccgaaccgtctaaatgtatccaaggccattcttacaacccccaacggccgcgagaaaatagctgcaagcatttcgtcagtatacggaacattttcactaagaaagatgtaaccggaggcgttggtcttaccagcttgagcgagtaatttcacccatataattaacaatgtgtcagcttcaggcatctgttcaataagtttgattttttcatcatcaaacatatgagtactgagctttacaaatttaatttcgcccatccaactcacccccttttgacttggtcaaaggccatacagaccgtttgccgttgacaattacagagctgagggtgttctgctgacattgatcagacaggcaggtgccgccttgagcttttagttcggcaattgctttttcgtgagtattaacagactcgcatataattacgtgaatttgattatgcagccaaacgtggctttctaaaaacacatgtattctcctttcggttatttgttgaaaatctcagcaaagtgcttatctaaaaaggcagccattttagaagcttgaaagctccagttttgccctttagcttgcgggtaaaatacaaaacccccgtttgccgaatctaaaaatttgcggaaccgacttgggtataaaatgttttctttgatccactcgcttttacgtgctgtctttttctcaaggtctttcatgttccaatagaccccggataacgattgttctcttagttcctggagttccaccttgctgatcagaattttgtctgcagggatcggaattgacaggctaacatcaagaagttgttccataagtttctcctctcatgtctttttaaaattttactcactttcattttgttcctgtcagtaccattattactcaaaaaaaaatcggaccttaatattaagtttcttcgtgaccttttcaatcgcctgcatagaaagattcgctttccctctctcaactcttgagatgtatgaagctgtgtaccctaagaattgagcgaattcgatttgagacattttccgcttttttcggattttttggagcagacgtccaaactctttcatatcgaacatttggtttaacacatccttttttgtacctgaaaggaacaattcgatcttaacatagcgaatttttttacacaagtgctttttaaaagaattttctcgtgaggtacacgatatgatataattacctatgaggaataaggttaatttttcaaaagagcaggtgttattatgggaaatatgaaaatgggagaagcgattcggcgtattcgtaaggaaaagaaaaaaacattagatgaagttgccgaagctgtgggaattacacacagctacctttcaagaatagaaagaaacttacaacagccatcaatacaagtaatagaaaaaatcgctgactatttaggcgttcacaaatcatacttgttttttgatgaagagagcctagaaaagtattcagaaccagagaagcagcttctttcacagaagagtataacaatagatgatctcaagaagctaaacattgtccacgataacggaagtaagataacagaagaagaattgcaaatggttataaattatttaaaggaattaagggaattaaaagaacgacatttgaaagatttaaattaaccaactttaagtttttttgtgtccacatttttctccttttcaatttccttttttagattcccgatgatgttctcgaatgtaatatgcatgatgtgtttcccctctcaaaatagaacgtttgttcctattatatttaataacaattttaaaataaatactttttcaggaatttcctattttcgtttttccggaaaacaggaaatatccccgaaaagtacgaaagacgttgccagtcaaggcagcgtctttttgttgtttcatatacttttcgggagtcagatatactacatgcctactcttatctcagtcgtttggaaacttccacctgctactgaatggtttaatgaaacaccaacaaaagcagtagtcaatataccgaacgctaaaactaaagtcaatgacatttttctcatctgcaacaccccccattactaaatattaaaattaaatcctaattttatcaagttaattttgggaatggttgctctaaactgatcttgttgttgcgaaaaataataaagagagagtaataatttttcagcattttcttctctttttccgtcaaaaaggagagcgtattttttataaaaaggatcagaataaaaagaggttaatggttcagaccttcctagtgcctttgcgaattcagtcacttgaaactcctttgaaatttctttgttccaataatattgcaatatggctatctcttctttattttgaaccatttcctcaattcggtcagggaaatttgcaagtaggttcaaacacttcaaatagtatctataagaatggcagtatgactcattcatataggacaatgccaatatgtataaagctgtcatgttcagattaatactgagatctttttcgaggagagagaaagccgcctctctcgccttattaacgtcattgttttgttttaaatatatattgactaagacttcttctatgcgagcagtaaatgcgattttcaaaaacggatctgatagattttcaataagacttcgaatggatcgaatgtggtatagagttatctcatacctgccattataaaagtacccatacatttctagtatgctcaacaacgttctcatttcgttacaagaaggactaaacttctttaatccttcggtatactcaatattcccaaaagagaatcttgaattaagaataaatctataaatattggaccatagatcgtatttgccatccctttcaatctgggcgcttatcaatgtctctataacagaatataattgcttagtgtagcaatattctaatgctgcaggataattcttcttcttaactccgtttaaacaatattgctttatcaattcagtttcattatccggatcaagataccttatgatctctcgaaccatccaaaagtttatctctttcccactgagaaacttacttaaataaccttcacttatcccaatttttgcagcaatcatattctgcttttcattggatgactttatcaattcttttatatgaatccttatatcactagttgctactgattccatatgatcaccttttcacctcaaatttaacataatcacaaagagaattttgtcgaacgatggcgataagatttagaattttttgatttttattgttataatttattcctatcaatacttattataccttattttacaatggttaactaagcggaaagcctcatttgaaacaatcttttaaataaattaagataatgctatcttattattcgagaactaaagttccccccctataggagtgaagaaatggctagtttcctaaaacgcggaaaaacgtggcagtattgcgttagcgctaaaccgaagcccatcaggaaaggcggttttaacactaagaaggaagctcaagtagctgccgcagaggttgaagaaagattgaggaaatataaaacgccgggcacaataaaagtcctctttgatgaatactttaaaagttgggtaaatgtttatagagctgatattggtgctatcactcgtgaaggttactatattacacttagagaaatttcaaagaattttgcaggcagatatatcaatgacatcactaaacgagaatatcaagggtttttaaataagtttggagctgaacacgcaaaagaaactgttagaaaaataaatacgcacattagagcttgtgtacaagaggcaattgaagaaggaattattcagtttgattttaccaggaaagcaaaattgactggaagtgtggaatcaaaacgccccgaagaaaaacacttgaattatgttgaaagtcaaaagcttttgaatgaattatatgtgcgcaaggatcagtctatcggatattatttattaatactggccctaacttcaggaatgcgatttgctgaaattgtagggttaacacccgaggatttcaactttaaattaaatgagattacaatcaacaaaacctgggattataaaaaaggaacgggttttgctaagacaaaaaatgcgtcttcgaataggatcattaaaatggattctaatacaatgggtttattcaaaaagctgtttgctgaatctgaaatacctgataacatacataatcttgtattttatagtcctcgcagctctaagaaagtcatcactaacgaatttgtcaacaaaatattgaaaaagacattaacagacttgaaaatagaatcaatttcgatacatgggttgagacatacacatgccagcgtgttgctctataaaaagatttcaatttattatgtctcagagcgtttaggtcatgccaagatagataccacgcttaattattattcacatataattaaagaactccgtgaagaagatacacgaaacacccttgatctgtttgaaaaaatgcctggcgtgaaaacatctgtttagaaatgtgcaaaatttgtgtaaaaaaaaataaaatcatatcgtttttcaacgggttcttacacaaataaaaaacttgcaaaaacgagaaaaacccttgttacacaagggtttttctgctttacagacattattaatctgcacttatcttatgcggaaaacgctctaggagagattcgaactcccgacctgcagtttaggaaactgctgcactatccgctgtgctactagagcctgcttctattatagtaacgctggcggccgtttttttcaagcctacagccctccgaacactttataggcggctctcgtcgtatcttcatctattccgatataacgcattgtaatagacggagaagaatgattcaaaatcctctgcagttcagcaatgtcttttgtcctctgataaaaatgatacccgaacgtctttctaagcgtgtgcgttccgatttcctccaacccgcaagcggcagccgcttcctttaatattctgtatgcctgaatccgggatatgggcttattcgtccgtttcgatttaaacaaatagtcatcctctttcatgtcttttgtataagcgtatatgtcggcctttaaagactccagtatcagaatttttcttttctttctcgttttgctttcggttgcccacacatggtctttgttcctgacatccctcacgcgaagcggcagaacatctgaaatccgcagtgcgctgttcatgccgaaaataaataaaaaataatcacgatcacttttcttcattaaatactgtttgacttcctggatcttctccaaacttcggatcggctgtacgatatgcatcaaaaaaccccttataattggtaaagtaacatattgagcattatgttactattatagccgaaacccgttgaatgataaagggtaaagggtcttatgtaacataatatacatagtgttacataaggtgaatcagatacgcagtttcaacaaatccctcaaaaacatcattttcagcccggtgacaagcttttaaacaaatagagactcaaggcattaaaaaatgaaaacaacggccttaaaaggaaatctgagcatccgtttttttgtgagcaaccgaaaaaaatgcaaaaaaagacacaatatgaaattgtgtcctagtcttcatcttttacatcaatgtcttcaggaagcggctcatttaaaaactcttgaatcatttccttatatttttccagctgttcgagatgggtttgaaattgttccttgttgattaaatattgctgtccgtcatggacggcccttattttattcgtcaaaacaagattgtgcacatattcttcaggaagactggtaaactccgctgtctctttgatcgttaaatacatggctcacgttcctttcatatgtcatgtgagtgaattctgttttgttcattgtagcttattttttgtctttatgcttgtttcacagctttttcagtccggtttcccatttagcctatttgcgactgattacattcacacagaaaccccaactttttgcgcatcggactattccgtttgtcacttgtgaaaacagcacattttacttactctataattgtaagcggaaaacaaaggaggcagactatgaaaaagaaaaagtttatgaatctctgttttatcgttctgctcagtacgttgctcgcggccggaagcatcccttatcacgctcaggctaagaaacacccgttttcctatgacgactacaaacaggtagatgtcggcaaagacggcatggttgccaccgcccaccctctcgcttcacaaatcggtgccgacgtgctgaaaaaaggcggcaatgcaattgacgccgcggttgccattcaattcgcattaaacgtaactgaaccgatgatgtcgggaatcggcggcggcggatttatgatggtttatgatgcgaagacgaaagacaccaccattatcgacagccgggaacgcgcaccggcaggcgcaacaccggatatgttccttgacgaaaacggcaaagccatccctttctccgaacgcgttacgaaagggactgcagtcggtgttccaggaacattaaaaggactagaaaaagcgctcgacaaatggggcacacgctccatgaaacaactcatcaccccttccattaaacttgcctcaaaaggctttccgatcgattcggttttagctgatgccatctcagattataaagacaaattatcacacactgctgcaaaagacgtgtttcttccggacggagaacctctgaaagaaggagacacactcatccaaaaagacttagccaaaacatttacagctattaagtacaaaggcacaaaagcattctatgacggagcattctccaaaaagcttgcggaaacagtgcaggaattcggcggctcaatgacagaaaaagatattaaaaacttcaatgtgacgattgacgaaccgatctggggagattaccagggctatcatatcgcaactgctcctcctccaagctcgggcggtgttttcctgttgcaaatgctgaaccttctggatgattttaagctttctcaatatgatatccgttcttggcaaaaatatcagcttctcgcagaaacgatgcatttggcttatgctgaccgcgccgcatttgccggggacccagaattcgtcaacgtccctctcaaaggcctcttgaatccagattatatcaatgcccgcagacagctgatagatattgataaagtcaataaaaaaccgaaagccggcgacccttgggcctatcaggaaggttctgcaaactataaacaagtggagcagccgactgacaaacaagaaggccaaacgactcatttcacggtaactgatcgcttcggcaatgtcgtatcttatacgacaacgattgaacagctgttcggttccggcattatggttcccggatacggcgttgtgttgaataatgagttaacagactttgatgcggtgcctggcggcgcaaatgaagtgcagccgaataaacgtccgctcagcagcatgactccgactattttattcaaaaataacgaacctgtcctgactgtcggctcccccggcggagcaacgattatttcttccgtcctgcaaacgattctgaacaaagttgagtacggcatggatctgaaagcggcggtcgaagagccgagaatttacacaaacagcatgacatcctatcgatatgaaaaaggagtgccggaagaagcccgcacaaaactgaacgaaatggggcataaattcggcagcagcccggttgatatcggtaatgtgcaaagcatcctgattgaccgtgaaaacggcaccttcaccggagttgccgactcaagccgaaacggagccgcaatcggcgtaaacttgaaaaaatgtgaaaaatgacaagacaaagcctcgtttctcaagctgagaaatgaggcttttgtttattctgcactgtattcagatgaggttttttcagacgttaatgacgcaagcgaaagcacgccgcacatcgcgatgacaacacccgctgatccgatccatgtcactgacgcaagagacagatgggtgacaacaatgcccccgatgcccgctccggctgccatagccagctgcatgacagactggttgaggccaagtaatacacccgatgattcaggctccatcgttgccaaatgatactgctgagcaggcccagatgaccaggcggcgaaggaccaaaaaataagcactgccgccgctccgaaagcagaatgtgtgacaaacggcaataacatgagcatgatagcatgaagcgccattccgccggttaatgtcatacgcgccccccatttgtctgcgctgaaaccgcctgctttagaaccagcaagacttgcaacaccgaaaataagcagcaatgtactcagtattccgctgccgatatgagtgacgttcagtaaatacggagaaaggtacgtatacgcaaccgagtagcctccgagccaaaaaaacgtaatggccagcccgacagccacctttcgtttcttcaaaagagaaaattgctgaatgagcggcaccggtttatctccttttatctcaggcaacgcgaaacgtataataagcatggcaatgattccgattgccgcaattccggcaaaaaccaccttccagccaaaagcttcagacacggttcttccgatcggaacaccgataatgagcgccgccgtaaaccccataatgacggttgcgagagaacttgcctgttttcccgggggagcgatttttgctgcgatcgtaagcgcggtgaccaccacagttcctgctccaagcgccatgatcacccgcgctcccgcaaataagccgaatccctgcacaaggaaagaaatgatattcccgataacaaacagccccagagcatagatcatgagcttccttctgtccagttttgctgtaagggccatcatgacaggcgttccgattgcataaacaagtgaaaaaatcgtaatcagctgccctgccgctgccacagtaactcccaaggaacctgcaattttatcaagcatccctgatatcacatattcagacgtccccactaaaaaactgataattgccaaaatgtaaatcttccaggtattttgcacctgacacactccttcattgatgatttatataaagatatattgtgatatatcgatataaagagttgaacaaaaagaaacaaatcgcaatatgtcgatgtgtagtcagaaaaagaaactgaatccctcttctaaaggattcagccctacatttcacgctgaaaataatcggccatcgcctttatcgcgtcttcatctcttttataataggtgtatttgccaatccgttttgtttggataaggcccgcccgctgaaggatggaaagatattgagacgccgttgactgtgtcatctgaagcttatcggtgatctggctgacacacactccgatctcattcatatcaatgccatcatgcggtgcgaagtgacggtccggctctttcagccattgcaaaatctcagcccgtgactcattagacaacgctttaaaaacatcaataggtttcatacgctttattatatcgtgattttacgatatgtcaatattgtttttattaaatctctattttttgttttgcctctcttatgatccgggaaataaaatcactcacattctcttcaaatgtgtcttcccgcccgtattgccttacatgtacagattgatggcggcactctcgatctcccacaactgcaatatatggtatttttttcatttgtgcttctctgattttatagccgagtttttcatcacgctgatcaagctcagcccggatacccgctttcttttgagaaaaaccggaacgaaaaaaattggcgtacacagctctcctgttttctcatcttccgttcggtaatgcttttaatccattcagcagttcttcaaacgccgatgtcaaaaataaatcactccggtagataaatgatatattcatatcccgaaactgttcagggagctcatgaagaaaaagatttttcctgttttgaaaataatggacggctgatgcaggcagaaaggaaacccccatccccgcctgcaccgccccaataatggcttccaacgtaccgaattcaatgattttatgtgtgggtactgcctcttctttcagtatgttttttattttgcggcggtgcgaacagcccgcggcaaaataaagaatcggctctcgcaacaagtcttgcaaactgccttcccgcttatttgaagccaagaccaattcttcttgaaatacagcgacttgctcaagatcttcgtattcgaccggaccataaacaaaagcgccgtccagctcatagtgtaagacgtgctgcactaaagtatgtgtatcaccggttgacagagacagctgtactttcgggcagcggctgcaatactctgtgaaaaattgagggagatggacggctgccgccgtttcaagagaaccgattcgaagcgggccgttcggatcgcctgcctcttgcaccgttttttgcgcctcatgcagcaattgaaggattctgtcagcgtctttcaataagttttcacctgcgggcgtcagcgtcatcccccgatttgtgcggtaaaaaagctgtgtttgcaattgccgttccagctgctgaatccggtttgtcacatttgattgaacataatgcaggctttctgccgcctttgaaatacttcctttgcgggcgacagcctgaaaaatctttaagtctccgctttccatgtaagggcaccttcttgctatgaattttattgatagccggctatcaattttcatttatttactgcagctgatacagcctgtaaaatctttctcatcaatcataaaggagagaagaatgatgaatgcccttatcatacacgaaaatggctttgatttcaggcaggcacctgacaaaaggccgggaaacggcgaagtaaaaataaagctgaaaacagccggattaaaccatcgtgatttgtttttaatgaaaaaccacgaaaccggaaaccatgaatttactctcggttcagacggcgcgggaatcgtaaccgaaataggacacggcgtccggtctcatttactgcatgcagaagtcatcatcaacccggtgctgaattggaagaccgttgaggacgtaccggccgtccctgatattttaggaggtccgagcgacggaaccttttcaccttatgtcatcgttcctgcggaaaatgccgttttaaaacccgaacacctgacatgggaggaagcgggcgtgctgccgttatcagcattaaccgcttatcgcgccttatttacaaaaggacaattaaaaaaaggcgaacaccttatccttccgggcatcggaagcggcgtggcaacatacgccttattaatggcaaaagctatcggagcgacagtcagcgtcacctcccgcagcgaaaacaaaaaacaaaccgcactgtcatacggtgcagaccgggcgattgacagctacggtgactggaatgaggcgctgaatggcgaaaaagcagatatcatacttgacggtgtaggcccggccttgtttcaacactatcttgacattatgaaaccgaatggccggatcgtaacatttggcgccagttcaggcgatcagctcggatttcctattcgctcgctgttttttccgcagattcatattctcggtacatcaatgggaagcaatgaggaattcgcggatatgctggaattggtaaaccgctgcggcatccgccccattatcgaccgcatgtaccctctcagtgaagcagctgccgcttttaacagaatgcgggaaggacggcagttcggcaatatcggctttcgtttggatgtctaaaaaagaggagcggacccgtccgtttccttatttgtttataagcgtttccgcttgaaattcaatatgtttttcttcatcaattcaaatctgcccgcaaatcgactgcagacacacagagcccgtcagcagcaccgtgatcaactgctcaaggcttgcaaatcgtctcagtctgcggaagaaaacaatctctccactctgtaaaacaaaattccatatgttatcttccgcgttacccttatatgaccaatacaggaagaaggaggtttcgtttcaatacgaaaaaccggctgatcccagccggttttataaataaacccctttatttacggtaaaacagtgctccccattaaataactgtcgacttcgcgcgctgcttcccggccttcattaatcgcccatacaatcaggctttggccccttctcgcatcccctgcggcgaaaacaccgtcaacattcgttttataatccccatatgccgcctgaattttatgatttgccgaatctacaccgaactgtttcaataatggctgttctgtcccttcaaaaccgatggcgatgaacaccagctgagcaggccatactttttctgtaccgggcagttcatgaaattcatactttccgaattcgtttctgactttttccatttgaatggtgtgaatctcttgtaagcggccctgcttatcggccaccatttttgtcgtctgaattgaatattctctcgggtctttgccgaactttgcctgcgcttcttcataggcgtattcaagggtaaagacgtgcggctgttcaggccacatattgtcgttcgtgcgcgtttgaggaagtttaggatgtttcccgaactggtgcacgctgcgcgctttttggcgcagcgcggttgccacgcagtcagctcctgtgtctcctccgccgattacgatgacgtctttccctttagcgtctatatattgtttgtctttgaagttggaatctaaatagcttttcgtcgccagtgttaaatagtccatcgcataatggacgccttttgcttcccggccttcaatcagcagattgcgctgcttttgggcgcctgtgcacaaaatgacggcatcaaattgatctttcagctcatctgccgttatgtcaacgccgatttcggtatttgttacaaaatctataccttcctgcgtcaaaagtttaatacggcgttcgacgacatttttctcaagcttcatgctcggaatgccgtacatcagcaggcctccggctctgtcagcacgctcatagaccgttacggaatgaccggcttggttcagctgatcagcgcttgccagacctgccgggcctgaaccgacgacagcgacttttttacctgtgcgtttcgctggaattctcggctgaatccatccgttctcaaaacctttgtcaatgatcgtccgctcgatgtttttaattgaaacagccggatctgaaatagctagcgtacaagatccttcacaaggagcgggacagacccgccctgtgaattcaggaaagttattcgttttcagaaggcgctccaaggcttctttccagcgcccccgatagacgaggtcattccactccggtatcagattataaatcgggcagccggaggtaaaaccgttgatatcagcgccgatttggcaaaacggtgtgccgcaatccatacaccgcgccccctgccgctttgacgcttcatctgaaaatggagccgaatactctttccaatcctttaagcgagtgagagggtcccgctcagccggtttttctcgtttttcttccatgaatccagttggtttccccatgttcctctcccctttcttactgtactaccgcttgtttatggtctttggcaggcgtttggtgaacctttgtattggcttcaaaagcatacataattgcgtcttcttctgataaacccgccgctttttgttcttcgatgctgaggagcatttgtttatagtttttcggaatgactttgataaaggtttctgcggctttttcccaattgtccaggagatctgcggcttttttgctgtttgtcagcgccgcatgccgtttgaccatttcttcaacttctttgatctccgcctcatccgtcagcttttcaaatgaaatcatttccatgttgcatttgcgtttaaatgctttggcatcatcactcaggacgtatgcgataccgcctgacattcccgccccgaagtttttgccgacttcgccgaggacgacaacccggccgcctgtcatgtattcacagccgtggtctccgataccttctacaacgacattgactccgctgttacggactgcaaaacgttcaccggcgcgcccgttaatgtacgcttccccgcttgttgctccgtaaaatgcgacgttcccgataataacgttatcgtgtgtttcacaattgaaggcatcaggcgctttcacgatgatttttccgcctgaaagccctttgcctacgtagtcatttgaatccccgttcaaatgaagcgtcatccccttagggacaaatgctccgaaactctgtccggctgatccggtaaaatgaagtctgatcgtatcatccggcaggccttccgctccgtagcgtttagaaatttcacttcccgtcacggttccggctacgcgatttgtattattgatcttgatttcagcttccgcttcctgtccggcttcaattgcagcctgcaccgccggaagaataaccgtcatatcaagcgactggtcgattttatggttttgcgccgtacggaaagtgcggacgccttcaggctggtacagcagtgtggataaatcaagctggcccgctttccaatgcgctttcgcacgttcactgacatgaagaacgtctgtccgtccgatcatttcatcaagcgtcttaaagcctaactgcgccatatattcacgcacttcttctgcgacaaacagcatgtaatttacgatatggtcaggatcgcccatgaattttttgcgaagctccgggttttgcgttgcgacacctacaggacatgtatctaaatggcaggctcgcatcatgacgcagccgagaacgacgagcggcgctgtagcaaagccgaattcctccgcaccgagcaaggcggccattacgacatcccggcctgtcatcagcttaccgtccgtttccaataccacgcgatcccgtaaaccgttcagcatcagcgtttggtgagcttctgcaagaccaagctcccacggaagacccgtatgtttaatacttgttttcggcgacgcgcccgttccgccatcgtagccgctgatgacgatgacatccgcagtgccttttgccacaccggccgcaattgtgccgacaccggcttttgacacgagcttgacgctgatacgcgcgcttcgattcgcatttttcaaatcatgaatcagctgcgccaaatcttcaattgaataaatatcatggtgaggaggcggtgagatcagccctacacctggtgtagaaccgcggacatccgcgacccaaggatataccttgttgcccggaagctgaccgccttctcccggcttcgccccttgcgccattttgatctgcaattcatccgcattgacgagataatggctctttacgccgaaacggccggaagcaatctgtttaatcgcacttcttctgtcgtcgccattttcatccggaacgaaacgtttcgggtcctcgccgccttctccgctgttactttttccgccaagcctgttcatcgctatcgctaaagcctcatgggcttccttgcttaatgaaccgaatgacatcgctcctgttttaaaacgtttcacgatggaagcagctgattcaacttcctctaattttaaaggcttgcggtcttctttgaaggcgaacagattgcgtaaaaatccgattcgttcttcatccgctgcatgagaatactgcttaaacaggctgtaatcatttttgcggcaggcccattgcagcgtatggatggttttcgggttgaaagcgtggtgctctcccccgttccgccattggaattcacttcccggatcaagggtttggctgtaatcatccttgtacgccgcttgatggcgctgtttcgcttcttgcgcaatcgtttcgatatcgattccgccaagctgagatgcagtaccggtaaagtatttagcgataacgtcttcaccgatgccgaccgcttcaaaaatttgggcgcccctgtaactttgcacagttgaaatccccatttttgacatcactttcacgacgccttctgttacgctctttccgtatttgctgacagcttcttcatacggaatatcaagccggccttcatcgatttcctgcttatacgtagcgtaagtcaaatacggattgacagcatctgcaccatacccgatgagagccgcaaagtgatgaacttcacgcgcttccccggattcaacgataatgcttgcttttgttcgcagaccttggcggatcaaatgctgatgcagcgcactgacggccaaaagcggcggaatcggcgtcaattccttactcattgccctgtcagataaaattaacagagatacgccttccttgatcgctttttccgcctgctgaaacaaatccttcaggcctttttctaggtcatcggaaaacagcgtgcggatgttctggctcttaatgtcaggatgcacaagtgttttcagcgcataaaactgttcgtttgataatacaggagtatacaattttatgcggcgtgcatttctttcactcggatgcagcagatcgccttcagctccaagccaggtcaccgtagaggtcacaagctgctcgcggatcgcgtcaatcggcgggtttgtgacttgcgcaaacagctgtttaaagtaatgaaacagtgattgggcgcggtcggataaaacggcgagcggcgaatcatttcccatagagccgagcgggtccttgccttctttaataacagggattaaatatttctgaatatcttcatacgtatagccaaacgctttttgacggacgagaagatcatcgaattgttcctcttcccggatttccgggtcaggattcacttgaaccaattcttcttcaagccatttttgataagggaattcattggcaatttctgttttcacttcttcatctgaaataatccggccttcttctaagtcaatgagcagcatttttccgggctccagacgttttttatgaagaatgttctcctgctctacttcaataacgccgacctcagatgagaaaataatatggtcatcttttgtcacatagtaacgtgccggacgcaggccgttacggtcaaggatggcgccgatctgttttccgtccgtaaacgaaatggcggtcggcccgtcccacggctccattaaagagctgtgatattcataaaaagcccgtttcgctttagacatgtgagtgttttccgtccatggttccggaatcagcatcattgccgtatgtgccggtttccgccctgccatcacgaaaaattcaaacgcattatcaagaatggatgagtcactgccctcagcatttaaaatcggcagcactttgtgaagatcgtctccgaagctttctgaaacgaactgctgctcccttgctctcatccaattgatattgccccggagcgtattgatttctccgttatgaatcagatagcggttcggatgggcacgttcccaagtaggaaaggtatttgtgctgaaccttgaatgcacgagtgaaaatgcagatacgaaggtttcatcctgcaaatccaaataaaaagcgtcaacctgctcaggcgttaacaaccctttataaacaatagtctggcttgacaggcttgcgaagtaaaaatcaagctgttcttgaacgccccaattttccgcctgcttccggatgacatacagtttgcgttcaaaagcaaggctgtctttcaaatcgtttgcggcgccgatgaatacttgacgcacatacgggcaagtactttgtgccactgttccgatttttccgacatttacaggaacgcttctccagccgagaacgatctgtccttcctgctcaatgaatgcattcacctgtttttcgatcttttttctttcctcttcattttgcgagaaaaagaccattcctaccccgtaatggcctttttccggcagtctcatttctccgcactctttcttaaaaaaagcatcagggatctgaaccatcaggccggcgccgtcacccgtattcggatcactgccctgtcctcctctgtgatccagctggcaaagcatcttcagtccttttttgacaatgtcatgtgaaggtttcccttttaaatgggcatacaagccgattccgcatgcatcgtgctcaaattccggacggtagagaccttgtgctttcggcatttgattgtaagtcataattcctctcccccgatcagtttccgttaattatcggtcataaaatctgacaactttaaattaattgtaagttttcaaaacaatataaacaatatataatttagatcaaatacatctcaaaatgagatagataggtgtgaacgcaatggaattacgccagcttcggtattttatggaggtagcagaacgggaacatgtgtcagaagcggctgatcatctgcatgtcgcacaatccgccatcagcaggcagattgcaaatcttgaagaagagctgcaagtcactttatttgaacgggaaggcagaaatattaaattaacgccgatcggcaaacaatttttagaacatgttaaaacggcgatgaaagcaattgattacgcgaaggaacaaattgatgaatatcttgatccgaatcgcggaaccgtcaaaataggatttccgacgagccttgcaagccagcttttgccgacggtgatttcggcgtttaaagaggaatacccgaacgttgagtttttgctccgccaggggtcttataagtttttaatcgaagcggtaagaaacagggatatagatgcggcgctgctcggccccgttccgacggaattcccagacataacaggcaatatcttattcacggaaaagatttacgcgcttgttccgctgcaccatccgcttgccaaacagaaaaatattcatttaattgatctgcgcggcgaccaatttgttttatttcctgaagggtttattctccgtaacatggcgattgacgcttgcagacaggccggctttgcgccgcttgtatcgacggagggcgaggatttagatgccattaaaggattagtctccgcggggatgggagttactttattacctgaaagcacctttgcagaaaccacaccccggttcacggtcaaaattccgattgaatttcctcaagtgaagcgtaccgtaggcattattaaaccaaaaggaagggaactggctccgtctgcaaatgatttctatcatttcgtcattcaatttttctccaaacttgaacaatatcaataaaaaacaaacccgagcttcaaaacgaagcctcgggctttttcatatttttttagatctttctcagccgatcggaatggatagttcaacgtggcagacaaacgcttccggatcaatgactgattgatcggtctgtttgggcggcgtttctttaaatgtcttcagctgggctgaggaatagttgacgatgccgagtccgagctcttctccctgctgatcaagcagcctgacaaccgctccgctgctgaatctgcccttaatctgctcgatgtcctgcggtgacagctccatatttccgttcgcgacatcgcggctgctttctttttccatcacaatttcgccttcggggccggaattaaatgcaagccattgttctttgtggtttaacggcagggttccttccgcttcaaaatacgttccttcagccgcctcatctaccgcttgaagcagaatgtccggaatgttagcctgcccgagaaagcctttaataccggaggccatcacaattttaaaagcatccagtttcgaacgcattccgccggttcccatttcactcccggcatctcccgcgcttgcttctatttccggagtgatgtcacttacatgactgattcttttcgctttcgggttgctgcgcggattatcatcatataaaccgtcaatgtctgataaaatcacaagcatgtcggcatcaattaaacctgccaccttcgctgcgagtgtatcgttatctccgaatttcagccggttgactgtgaccgtgtcattttcattaataatcggaataatgccccgttccaaaaggacgttcatcgtattgcggacattatggtagcggcattcatcggaaaagtcgcttcttgtaattaaaatttgtgatgcgacataaccgtgcgctaaaaacagctttgaataagcctccattaataatccctgtccgatggaagcagaagcctgtttttcagggaggctttccggtttctgaataaatccgagcttccgataacctgccgccactgcgccggaagatactaaaatcacttcatagccgctgtctttcagctgtgcgatttgatccaccaatgcttccagctttcttctgctgatttccccgtgcaggctcgtcagtgagctgctgccgattttcaccgcgactcttttgatcttcgtccgagacgtcactgtatcactcctgttttttaacgattatagtgctgccgttttttcaattgttttgctgatctcaatagaacgttcggtcgcgtgtttgatggctttggcaatggcttctccgccgccttctgacctgagcgcatcgaggccggcttccgtcgtgccgtttggagaggtgatgttttcccgaagcacatccggtttttcacccgtttccatcagcattttagcggcgcccaataacgtttgcgcgccgattttgcgggacagccgtttgtctaagccggcttcttcacctgctttttcaataaactccattaaataataaaagtacgccggtccgctgcctgcgatgccggtgaaaatgtccatctgatcttccttgatcacgtacacttccccgaggcattccaaaagggataccgcggtttttgctgaaccgtaagagacatggtctccgaaagccgcagctgttgccgattcgccgatcatgctggatgtgttcggcatgactcttacaaccggctgattatcatgtaatgattgttgtataaatgaggttgttatgcctgccagaacagacaggatgatttgatgaggttgaatacgccgtttcagcgcagccagagcgatttcagcatccttcggtttcatggctaaaataaagacatcaatgtcttcggttttcatgctgtcaaaagcaatgccttgaattccgtactgatgttccaattcagcgagtcgctctgtattgcggcggtttgtcacgcagatgttttggttgggaattttttttgcgcggaccatgcctgatatcattccttcagccattgatcctgctccgataaaagcaactttcttttgatctaagatcggtaacatctcccttgttcgtattttgttcgtatttttcacacgttttttatgttaccacttcaggagtcgatgtcaagtttgaaggttttattgatatgtattgttccgagcctgttattatgtataatgaatcacagaacaaacctttagagaccgggaggccgggtgcgttccggccggatttaaaaattatctgaaatggctttttctatcagctttttgcagcggtcaagctctgtcttcagctgttttttgtaaagcttcgcagcttcatagtctttaaattgatagagaacgacttcctggagtttggctccctcttttttcactttcacttgctttaaaatcccgtcatctaaaagttcgtgaagtgaacggtacacctcggtatgattcggcttaaaaccgatgggtttaaattccgagcgcagcacctcgagaagcttcagtccgtaaagccgttcctgctctgtcattgtaatcatgtaaagctttaaaaaagctctttgtttcactaaaaaaccggttgaacttcttttttcttctttcaatatgtgcacacccttccttctaacaaattattccatgtactaaatattctctttatatctcgtttttccttttattgttcggacagtttggtttgtattgatttgtttttttggaggcggggaaaataatttcaatgaacatttggtacatagtttatttagtttaattatagctgatatcagtttctttttcactcttttttctgcaaaaacggatctttatgcctatttattcgggttgcgaaaacaaaaaaagacccgtcacgaagacaggtccccttttgtttaaggattagttgaccacaaaccggcagttttgatgaaaatgcgcggatgtaatttcaattgagcaaccatatattctgcaagatcctcaggctgcatgactttttccggattgccgtctgtcagatttaattcaatagacatgtcgctggcaaccgtgctcggagtcattgcgctgacacggatattgtgttttctgacttcctgcatgagagattcagtcagaccgagaacggcaaatttagaagcgctgtacgcacttgtcgccgcggcgcctctttggcccgccgtagaagaaatattaatgatatctcctgattttctctcaatcatttcaggaagaacggcgcgtgtcacgtggtatacacccattacattaacttgtatgatgtcttcccactcttcaggcgtaagatccaaaaatccgccgaatttgctgattccggcattgttaatcaagatgtcaatctcaccgagttcttctttaatagaggagacggcttgctctacctctttttggttttttacatcggcagctgcgaatgatgcctttacaccaagggctttcacttcttccgcaaccttttcgacatttgcttctgtgcggccgattaaaccgatattgactccttctttggctaaagcgatagcggcggcgcggccgattcctctgcccgcacccgtgataagagccgttttgttctgtatgctttccacgtctttcaccctttcagaatgtccttatgtacgatttcacattataagcagaaaaaaaacaattagcaaataaaatgattcaacacgatccgtaaagggtatcaactgaaaaaaaggagtgaaaagcagatgatcatcattttgtatatcagtgctgccgttgcggctgccgcattcatttatgcagccgtatccgccgtgcattttaaaagaaacacagcgcctgatataaagaagattaacgccgcgacagcgtccatgcagacggccgttgatgaaatcaaaacagaaaccgatctgttatcgcaaaagcagaaagagctgaaagaagattttctcactaaaaaaacagccgtacaaacgacggcggccgaagttaaaggaacgcctcacgtcctgaagatgctctggaacgccggtaaaagtgatgtatgagcctgcatgtcatccgacgtttttgatgacactaagagaaaccggcggattcaaggaggcataacatgatttgcgatcgtgagcggcttgcgcattttttgcagcagcttaaagcactatcatcttcgggagggtttacaaaatcggatttgctgactccggctttccatttagccaaggacggagatctggatttgtattattcgcctcataatgaatatattaaccctcatgcagtcgttgccatttccggaatcacacccggtttttttcaaatgcagctggcttacaaaaaagcggcacagcttttaaaagatggcgaaactcttgaaatgatagcctatgaaacaaaaaaagcggccggactttccggttcaatgagacagaacatcatcgaaatgcttaatgaatgcggtctgccggccgcgcttcacgttgaggattcatcccggttatttgattcaaaacgggagcttcttcatacaacgtccgttatcaaacaccctgttttttataaacagaaaaactatacgggacatcggccggcaatcagcaggtcagctcttctaagccgttacgcgctgacatgttttccggatgaaatagaaatgatgaaaaaggacattctgcttatccctctcggcaaagcagcagaatcagcctgccgcatgctgaagaagaacggcagaatgggtcatgcggtcattctggaaggcttcccgcatccgtccggagcaaacggacatcgtttcaaacaatttcacgaaaacaaacaatcgttacgtgaacaaattcagcgctttgccgggtttcttcagcagctgtaaaaaaacgccccgaattttcggggcggtgctgttaagaagcgtattcaggcaatgctttattgtgttttgccgttttctcttcaggtattttgatttgatttgtcaagattgcacttacgaaatagagcgctgcgaaaatccatacaacgccttgtgcgccgacaagcccgatgaacgcccaggcaagcgcggggccgacaaatgccgacaggcccgcagccagatttaacacagacatggcagcacctttatcgctgccggccgccgtcggcacgatagccccgatcggaacgaacccggcgaggagccctccccatataaaaccgacaatgctgacgaaaagcaagttcccatgtgatacaacaggagcataatataataaaagagtaaaaatgccgcagcccactcctccgaaccacatgacagtcttcttccagccgaaggcatcgccgactgcgccgaatattaagttaaagacgatatttccgagaaagatcgttccccaaatttgaagccatacatttgtagaaatgccgtgctgcgccatatgcatcggaagaaataccggaaatccgtatgtaccgatgctgttaatgatccgaatgatccccccagagagcacgcgcggattttcagcaaggatggtgattcccttcattaattcctgcgccttttcccgcttatctgactttttcttttcaaagcggtccctatttaaaatcagggcaaaaaacgcgccgaggcatacccagaaaattgaactccacagtgtattcaaatagccgaaggatttgatggcccagcttgaataccaggcaccgaatacaaacatcccgcagcaatatgcaatccagaaccagccgaccgccgtactgagcctgtttttcggcgaccggtaaatcacccatgtcaaaaaagaataggcaaacagcggataacccagccctttaataaaatacgtgacatacatcaccggcaaattaagattttcaaatccgtatgcgataaacgcggctgttccgatcacgtaaaacaacagccccataaacatcgtccgctttgcgccgaaggcttcgaggcagacccctgaaaaccaagacgccacagcgagagaaataccgtaaactgtaaacagggatgctgattgctgtaccgtcaagccgttttcaactaaaaacgggctgagccagccttgttcaaggccgtcccccatcataaacagcacgactcccaaaaatccccatgcgagctgttttggaattcctattttattaagcatttttgttcctcctcagcaatctttcatgttgtcatctcatccccaagtcaggctttcaccgccggctgaaaatgagtaaataatttttgcgtatgtttccattcttcatataggaagagatccgtctgatccgcttccggctcaattacctttgtgcggctcgaaagctctgctttcacaccgagagcttcgttgcaaatcatcgccgctcccattgcggatgcctggctgaacccctctctcttatagattttcttttggagaaggttagcaagaaactgcgtcaaagcatcactttggaaaccgccgccgcacaccttcacatcatcttgtgaaaaggaagccacctctgttaacgcctcatagttccatttgattgaaaaagcgatttccagcagtgcggctttgacaaaatgggctctgcttaagttttgggacagcggagcgtcaaaaataaatccgccttttgccagtgcgtttttctcaggcgataaataggagcctaacgcagaaatacaagcatgatcatgtttcggcagacttgcgatttcccgttccataacgccgtaggattcattcggataaaaaatggattttaatttttgataattgagtcctgttacacccggattcgtttcaagaagccattgaccttcttctgtatggcaattcagccatgcattctctaaactttcggttccggcctccgctgttatctttgtaatcggcgtcgtcgtgccggatacgatgacgatatctctcggctttgcatctgcacttttgatggcaagctgtgtgtctcccccgcctgcaatcacaggcactctttcagaaagaccgagaaccgccgctttcttgaacgttaacactccgacaaccgtcccagatcggacgagtgaaggaagaatggcagaaggcacaccgaagatgttgcataatttctctgaccacgcctttttccttacgtcaaacagcagtgtttcagcagcctgtgacggttcatagcttaaaataccgctcagctcaaatgtcacccagtcactgatgcttgtgatgtacttcacttctttccataaagacggctgtctagcttttaatccgacaagtttcatggcggaaaataaagcgctcggaagacgtccggtttgctgatgcacttcttcttttgtctcaatcccgtcttcccattcacggcctctgttatcaatgttgggcagaccgagaaatgcctttttatctttattgatcagaacaattccctgcctctggcttgtagaggtgattccgattaatgtaatatgtgggcttttggcaataaccttccttgccatagcgctgatttgcttccataacccttccggtgagaaatatcgtccgtccggataaagcggatccgtcacatattcaatgtcttccctttcaagcgcggtcacttcgccgccggcagtcacgaccgcgactcgcgcattccccgtcccgatgtcaaatacaaggtagcctttttgttcagccattacagcctcctccttccgtttcaagttctcttttgttataaagttcacgtattgagcaggtttgatcttgtttccatttgaaaagcgcttcatttaaaatcttcacatgatgatcttccacttcaaatgttgcgcccgctaaatggggagtcgctaacacattcggcaaagagatcaattcataatcagaagattcaggcggttcgtgataaaacacgtcaaggatcgctcccttaatccgccgttctttcagcacccgcagcagctcttccctgtctgtaaccgccgctcttgacgtattgacaaaaacagcttcctgtttcatcaattgaaagtgccgggcgccgataaggccgatggtttcttctgtacgcggcaagtgaacggaaacaatatcactttcagaaaatacccgttcaatcgtcgttttttcatactcccggttttcatgacggacaaatgggtcatagtaaagcaccttgcagtcaaaagcggccaatagccgggcgattctctgtccgacagctccgaaaccgataaggccgactgttttccccgtcagctcatttcctctgaatttgacataagcctgcaaataatcaccattccacttcccgtcctttagccactgatgggaagaatacgtatgacgcaaaaatgaaatcacatttccgataaacatttcagcaacagcctgggcattgcgggccggtgtaaagaaaacggggatttttcttttagtcgccgccgcaatattcacattagacggcattcctctgcagacaccgataaaagcggaatcaggcaatatgtcaataacacgctcagacacctcatcaagttcagtgataagccccgacgcgtttgtctcttgaatcattcggatcaattcatcttcccgataagcccggccgtgcttcttccacggccggtgcacagtccggccgaacagctcagtcagctccttcagcccctcgtcgtgatatggtgcggtaattaaaaccgtcatggtgcaaaacatccttttcacataaattttttcataaaaaaatctctttccccaaagaaggaaagagattcatataccgtctttatgcacttgaagcgcacaaatatgtatagatcattctttcctatctttcaagcatacgcttgctggaattggcacaataaatgttgccgaggtttcgtagggccagtccctccacctctctggatagaaaataaaatgatgaaattgtcaggctgtttaaaagaataaactcatcatagaaaagtctttccgtgatgtcaacactttttttctgaattgacgttcgattttgaaatgttataatgcttacaatataaacaaagaggagaaatgggctatgaattctgctgcaaaacagccgaacggggtctttaagtcggtatgctcactagactgtcccgatcaatgcggcttgcttgtgacaaaaaaagacggaaaaatcgttaacattcagggagaccccgatcacccggtcacatcagggaatatttgcaacaaagtcagacacatggctgagcgtatttatgatgaaaagcgcgtaaccgctccgttaaaacggatcggtaaaaaaggtgaagccgcgtttacgcctatttcctgggaggaagcgatcaatacgatcagtgcgcgctggaaagagcttattgccgaagaaggagcggaaagcattcttccgtacagcttttacggcaatatgggaaaactggcggcagagggaatggaccgccgttttttccatcgtctcggagcgagtcatctcgaacggacgatctgcagcaaagccggatctgaaggctataactatacaatgggtgaaggagcgggtactgatccggaagagaccatacatgcaaagctctttattttttggggaatcaatgccgtcagcacgaatatgcaccaagtcatgattgcccaaaaagcccggaaaaaaggggctaaaattgtcgttatcgatgtacataagaaccaaaccggccggcttgccgattggtttattcccattcgccccggcacagatgccgcactcgccctcggtatcatgcatgtcttattcgacgaaaaccttcacgatgaagcatttctcacagaatacaccgaaggcagtgacgaattaaaagcgcatgttaaacactatgatccggaaacggtttctgctattacaggcgttaaagccgacgatatcagacgccttgcgagaatgtacggggacacctccccttcccttatcaggatcggaaacggcattcagcaccatgacaatggcggaatgatcgtccgcaccgttgcctgccttccggctgttacaggacagtggctcaacaccggaggaggcgcaatcaagcacaacagcgcggtattaaactataacagacaagcgctccagcggcctgatctgctttacggcaggaagccacgatcatttaatatgaacaggctcggaagcgttcttttagaaacaaaaccgcccgtgcgctccctgtttatttacggtacgaatcccgcagtggttgcgccggaagcgaataaagtcagaaaaggcctgctgcgggaggatttatttacagtcgttcacgatctgtttttaacggaaaccgccaaatacgcggatatcgtgctccctgctgcatccgctttggaaaacacggatttttacacgtcttactggcatcattttattcagctgcaaaaaccggtgatcgaaccctacggggacagcaaatcgaatacggaagtgttccgtttgcttgccggagcaatgggatttaccgagcaggagcttcaggataccgatgaagaattaatcagacaggcgctggactttcccgacaatccgtatatcgaggatattgattacgaattgctctcacgccattccttcatgagagccaaacggaaaaaaccgctttttccgggcaagctcaaaacaccgagcggaaaaattgaattatattctgaaaagatgaaacaggacggttatccggcgctgccgacgcacatccctcttgagagcgatggcgattttccgcttttatttgtcccgggaccgaatcataattttttaaattcgacattttcgaataatgaaaaacacgtaaaactggaaaaagcgccaaagctttttattcatacagaagatgctgtacgccggaacatagaagacggggaaaccgttagaatttggaatcaccgcggagagtgtgaattgacagtttcggtcggcgaacaggtgcttcccggcgttgcagtcagccaaggtctttgggccgatatggatgataaaaaacagctcgtcaattcgctcacgcccgatcggctggcggatatgggcggaggcgctgttttcttctccggaaaggtgcaggtggaaaagctcagcaatcaaaaccgtccgcaataaacgccgggcggttttgatgaaggctgaatcctttcagccagcttcaccgtataaaaagtgataacgtttattggaggtttgctgtatggatatcataccggcatcggaatcactttagccggatatttcatcggagacggattgaaaaactttaaatcacctgatcctcatgaacacactgaccacattctcattaaagaaaaagatttacacttctatattggttattatttaggagttacgaaggaagaagcgaaacaaatcgtgcccgacacctctgacgttccgcatatcaagagaaacggaaagcggtatgtacagaaaactgcattaagagaatggctgacttccatgctggaaaaagaataacagctgccatgaaaagcgggaagagtttttctcttcccgtttattaagattcgccgccctgcctctcttcaaccccaaacatacgacggatatcgttcttacgtaacgaaacatccccttctttagatttcaaataaaaccctttcttatataaccgtatgacttcctcatatgtaagctcatgacgaaggagcgccattaaacgcccgtctttttcatcttgtttattgaaccattcatactgttctgaccagttcactttctgcatgtcaaacaccttctcactttggattaatgcccttttcgcatttattatacttatttccccttttgtaaacactccgactgcctgtgacatttttgaaaacagccgtaacccctccaattagtcaccatgttgacttgttcctcatttcgttgtatattataattgtcaacatggtgacaattaagataggagataccttatggatattaatttattaatgaaggaactgcatgttatgcaacaaagttacgcatcattattttcggttgtcaataaagtgcaggctcggggggacgaatacttagaaatgttgacttcccgacagcacatgactcttattgctattgcccatttaccgacggaagataccacacttatgaatatcgctaaaaagctgggcacaacaaaacaaaccgctaacaaattaatttcaagcctcgcgaaaaaaggatatgttcacactgtgccaagcaaactggataaacgtgcaatcaatattgagattaccgctgaaggaaaaaaagcgttaatttcctgttcagaaaaatccacctattttttagcggatatgtttcatgacttcacaactgatgaaattgaaacattctggaggctattgcaaaaactttatcgttttgatggtgaagaacaggatggttttgaagaaaaagcacatttgaaagttgaagatcaggcacaattcatctcagatgactatgaagaaaaaatcatggctgaattttcaaaacggcgatatgggagtgcagacgatgaataatatgctttatcgaaaagtaaaagaaacagaggataagatgaaggaaaaatgctatgagctgaaagataaaattgatcaatttatttctcatgctaaatataaaattcatcgcaaacgcaaactggaccgagccggcaattatatatcaattgccattggactctttatcctaactgcctcatggctgaccgcaacacaatggctgctttggataggcgcggcgagtattttgagtaatgcctgtttgctcattataaagcctgttaaaaattgaaaatctgaaaaaagctctctaaaagagagctttcttttattaatcgtcccagtcttcatcttcttcccagtcatctttcgcttcctgaatcttattataaaaaaattcgataaagctttctgcagcgatatcttgatagccaattatcctatcccattccactacagggcattctccgtctttcattttattcgtatctagacagtaagcaaagaaatcaacatcttctatgacaacaagaccatcagcaagtccataatgttgtttatattctttagttttatctgcaactgacgcatgatcgaagttatagcctaaaactaaaaccccgaataaaccaccagcaccgtatttttctaagaaccatttatagctaataggaagttcgcattggagggtttcttcaatgcgagttatgttttccaggcttgcaccctctgtgaatatagcattttgcttgttttcattaataaaggtttcaacctttgaataaatcatttaatttaaacacctcaattctcattctcaaattgtttcgctctccacttccaatatctctttcgaaagctttcatattgtgcttttaaaaccttatcatttctaaaactttcaccatcagtcttaagcttatgaataacatcactatattttgtatgtaaactgtttgggatttcaagcattgggccaggttcttcttgaatcaagtgatgtaaattaatctgtgtgccatcttttgcataaggagcattaccgtttttcataagctgaagatttgttaccccaaatactgttttttggttcatatcaatatctttcatagtatacactctgcggcttatgtctttaacttttccctttgcttttaccttgcccttaacctcaaaggcaccatacttttctttatttaaccaaggaaggtttatttcttgaccagtaaacggctttctcgttccatccgggattttctttgcattggtcaaaagttcatttttaaggttttggctgtcaaccacattgtatggtacgtcacccgacagagcaagatcatatttagagttataaggaagcagttctggaagtttaacgtctttaattttcttccctgcctgtcctgccctgtttatgactttccccgccgcatcagctttgttaacggctcctgcgcctttcgttccgacgacagccacagctgctgaaccaattgcatatgtcacccatcttgatctggagtaagcatctccgttcaccatatctttttgatacgattcctcgattgctgccgaaacagcatcatatgttttaacaggatgaagtactgcattccccagtgctgacaaggtttctcccggatcggttatgaagtcccataaaccggttaccgtgtctttcccgacatcatatagaccgacgccggctccttttaaaatatcccaagtcacttctccggcttcttccagctgttttgcttgttcaagctgaatgacatattgctgctgggaaggttcaaggttttcatagccgatcttatttgcaatttccaaatattcatccggatcggtcacaccgtcagcgagctttttcttcagatccttgatttcccgctcttttgcttcttccttcttaaacgttaaatatgtgtctgaatgtcttgcaatctcaccttttttcttatgtatgtcactttccctgtatgccttggcgttatagtgaagcggagtggcgtttttcccttttcccctagcgttttggagctgttgaaaatctgcctgaatgaaatgttcatttgcctcggtttctgcgtattctttcgttagatcgtgatcaagctttccgagtttatgtatggtatcgttcctttttttatctgctgactcaagcttttgatcgacatcttctgtagagaaaacatcaagatgaatgatatcgctgatttcatcaaggatacctttcatttcattgcgctgctcctgcatgatggcttgtgattgattcttcgcatggatcagctcgtgttctaaaaaggactcttccacaaacgaatcgcccaatccggcatcagctacttttcctgaaatactgttaagaaacgcaatcttcatatcgatcagatcaagccagctgtctgtgacaccggcgtgatcttgaaagaatgctttaatgttgtctgcgcctttgcctgaaaactcactgtcgtctaagtcagccattccctgaaacgcttttctgagattgataaattgttctctaatctgatcgtattgttttgcccgcttttctgctgctgaaatgaacgaggctgcttcaaatactttcatttacggctcctttctgcttctttctgtctaaattttaccataggatataagattagatgaatctcttgcatttgtcgaactgctttattcaagatcataaaatttcaaagaaaaccttacacgacggaatctgggatcggtaaaacaaagccagatataacatatattaaaaaatctcttgcattttcacacccggcatgctatattgatatagcgatgagctgaattgtgtaagccgatgcacatgcccttgcggcacacacgaatgtggcgtgtggtgtatcgcctcaatacgcaaaagacgtttgcttctgcaaacgtctttttttattatccgattttcgttccgtttggtactgtctgctctggcgtaagcaggacaacgtctcctttttccgggatgccgccgagaacgagaacttctgacttaaatccggcgatccgccgcggcggaaagttgacaatagcggtaacctgtctgcccgtcagatcacccggttcgtaccgttttgtaatctgggcgcttgattgtttcatgccgatctcttcgccgaaatctattgtcattttaatggccggcacctttgcttccgggaatacttccgcttttacgaccgttcctattctaagatcaagcttgataaaatcttcgatgactgccatatcaaaaactccttttttacaatcatgataccaaaaaaagaagcagtttatttaaccgattttcaggattatttatcagattgaaaggtgtttcggaagacgcgcggcgttattcccttatgtctgacaaaccatctggtaaaggaagacaaattttgaaagccgacctcctgactgatgtctgtcagccggcattttgtttcaataagcatttgttccgctttcttcatacggagctcagcaatataagcttgcgggcttttccccgtctgctttttaaaccagtcggaataatacgccgggtggtaatgttccattgcggcaagctctttaattgtaaaagtctttgagagatttcggcggatatacgcaattgaatcatttgtacggctttcttgtatcttttcagcaatatattctgcaagcagactcaatgaatgagccgactgctgctttgtctcttctgtcagcagaaaccgaatcgatgtccaaaaaggatcaagcttattcagaacgccgggggcaaatgaacctttgaaaaaatttgccggtatgtcgagaacgagacattcatttcgctccaaagaacggaaccgatgttcatgcccgggcggaatatacaacatttgatcaggttttaatctgattttacgtctttctgtctccaagtccagctgtccttcgagcggaaagagcatttggcagtatgtgtgtgcatgagaatcaaatatatgtgaataggtgcgccgctcacaaatgatatgttgtaatgaatccatttgtccctcctttttacatgatgcgtctttttatttagtttacataataatattattgtttcctctcctgcaaacctcttagaaaagcaacaactgcaaacttccggctttccttaattgattcggttaattcaaatgcactctgttttctcaacacggcaaatccgtgaagaaggctcctcagtcctctcgcagcatgaatcgcagtgtcagactgtgcataaccgttagcagtcagctgcctgacaacaagctctacaagcaggcttgacagattctcaatccgcccgtcttttatcttttgaaatgttgcgtcatataatccgggattggcttcagcgaaattgatataggcatcggcaagagcaagcaaagccgtttcacccgtcagtccttctgcagaggccgccattttttcatataacatagttaaaccggagacagccagctctgctttaattccttgaaggccattgacaaaattgtaaagggaaggcggttttacgtttaaggactttgcaacagccgcaagcgtcacttcgttcagccctttttcgtcagcgatgcctgctgcagctctcaatatcatgtcaaggctcattccgactctcggtgacattatgatcggcctcccggcaggcttcgttcggcttcctcaacagcctcagccatcatttcaacgggattgcagagaacatttccatgtccggcggccagactgcttggttgatgagcgataagtgttcttgctgtttttacagcttcttctttattccacgtagcaaaagccggaaacggaaatttccatttcagcttcccagaaacagcaaggccgccccgtacttgaaaggcatctccgacgatcagcatatcatttctcgtatctttaaaagcgaggcttcccggcgtatgaccgggagcgggaatgacaagtaaagatccgatccgctcgccgcctttcagcaggcgatcaggttcggtctgaacatttttcggcactcccccctttatcggcgtttgtgcttcatgctcaaataatgaagtgtcacctttcagcaagaaagaatcccgctcagaaatacagacggaagcatccggaaattccgcagctaatgagtcaagcgaaccgatgtgatccccgtgcgcgtgggtgagtaatatgtcattcagcggcttcccaagctgccgcaatgcttgtttgattcctttatgactgttaggcagtccggcgtcaatcagggttactccttcttcttcttcaaccaaataacaattcaccgggaagagcgcgggaaaaaaagtcagctgccaaacggttccgtattgtaagattctcatgaacatcctcctaaaactaatatcattagttttattataactaataccgttagtttatcaagagttttctgtttaaatcctgaaaaaggcgcgggcgcttctcttatgcaaaaaaaagaaacgcgcatactgtgataaaagatgctttcagcctgcgaataaatcacactactaaaaccagccggataagcatacactactcaacggagggggagttccacaccatgcatatcacacttcaaagcatctgccctgtcttaatgattgccttttttctgtataaaaaggtgaaacggtccgtcggctttcagcctttgaaaccccgctggctttatacaagaatgattttgttttcattgctggccgcagctctggcgtttttcagcatcacacacccggctttatacggccatcttatattcggcactttttgcggctggcttctggtcctgtttgcaaaacggaacatttcttttgaagaacgccgcggaaaaatgtattttcgtactcacctgtggattgaacttattctattaacgttattcctatcgagatttgtttatcgcgttattgaaatttaccgggtcacagcggactttacccatccggaggcatacagccaaacggtcggggccgatccgctgaccatcagtatcttttatttcatcgcagtgtattacagcggcttctctttttatgttttaaaaacgagcagagaccaaaccgataacagtcagtacggctgacatccctgtaaaaaatgcagggatgttttttaatcgtgccgcgtatggtgaatcatttgctgaagcacatctaacacatgttcatcctcaggagaataatagatggatgttccttctctgcgtgatttgacgaggcgcagatttttaagaaaacgcagctgatgagaaacggtagactgcagcaaattcagcttttctgcgatatcatttaccgcgtgctcaccctgtgacaacaaatggagaattctgattctggtcggatcagacagcgccttaaaagtctgggcaaccaaaaataaagtttcctcatctaaatcgacagcggggtcatttttgtttccggattcgtgaaattcagtcatatacctcacccttcttttctcaagtagcccaattataccaaatgtcaattgatgcagatacatcctgcgcctgacaaaagaaccgttattttaaatttatgtttcaaatacgggtttccgcttggtttcgcgtattcatctgtgtcataatgaaaaagtcataatgctcctgaaattgagggtgaaacacagtggagaaaaagaaaaaaggctgtttcgctgccgcgggtcttatgatgatatgtgtttttgtcatggtttccttcttcctcattctgttattttcaaataatgaatggctcaaaagtcttccgtttgatgtcaaaccgatcgtccttgaacggctgacagattacaaaccgcttgttgaagacgagctggatgaaaaaggactcaccaaatatacatcgcttgtactcggcatgatatatcaggagtcaaaaggaagaggaaatgatcccatgcagtcttcagaatctctgggtttaaagcgaaatgagattaaaaaccctcaaaccagtatcaaacagggaatcaaacaattcactctcatgtaccaaacaggcaagaaaaaaggcgtagacttggatacgattatacaaagctacaacatgggagccggctatattgattttgtggctgaacatggaggatcgcatactgaggaactggcaaaacaatactccgagcagcaggtcaaaaagaatccgaaactttacacttgcggagggaacaaagacaatttccgttatccctactgctatggtgattacacgtacgcagaaaaagtaaaagcaaaaacaaaaaccgttgaacaatccttaaatgtaacaacacttgaaacgcatgaagagtaaaaggcgccctgatgaggcgcctttttcaatcaatagaaaaaagccgcgcagagcacggctttttttaataatacggcgatatcattaagtatacaatgacacccgtcagactgacatacagccagagcggcatcgtccatctcgcgatttttttgtggcgctccacttgcatgctgaatcctctgatcagcgtaaacagcgcaagcggcacgataacggcggaaagacagatgtgcgtaattaaaataaagaaataaatcccccgaatgatgccgtggccgccgaataaagtattttcagccacagagtggtatacgacatagcagatcaaaaacagcagagtcgtcgtaaacgccgccaaaataaagcgtttatgcgcttgaatatttttttgcttaatcataaagagcgctgccagcaaaaagataaaagtaaagctgttaaaaatagcatttaacatcggcagaatatgaatattggcaatgctgacctgtcccgatttcggcataaaaaacagcaccgcaattaacccgttgatcagaacggtcaatgtcagcacgataccggtataacttttaggtttgttttctgtctgattcatcttatgacctctctcaattttactgactatccaaatggtatgagaattcagctttgatgtcaacggtttcgtccgcttcgtcagaaattagacaaacttaagccctaaaaagaccgggtgtttgagacccggcctttcgtcatattatgcttccttcaacagttcttctatcaccttatgttcgttttcattcaacagattttttggaatgatccgatctatcggtttattcatatgctgatcgagaatatcggctgtttctttgtcccctgcgattacgagacgctcccattggtgtgaagcggccttttgatcaaggtttgaagccaatcgtttatacagcctgttttggttttcttcaacatgggctttggcggcgtcttcgtccatcgatgcgaagcttccgcttacatcctgcggtttccacgattcattgatgacgtcgtattgataatgctccaccccttcaatttttccgagtacggtttctatgatcttcacttcattctgctgggtgagaataaaagccgtgctcggaaattgttcacgaagaagttctaattgatcaaggacagccatctcttcccaataaaatcgtgtttcgacaggcacctgcaattcaatcgtctcccaaataccgccttctcccgatgcaaaaaatacgagacttcgcggcatctctttaccaagcccatcgatatattgatagacacgttccatgatgcggacgagagatttttcttcttccggatcactggcagacagatactcttttaatctccgaaaaccggttttcaaggcgattttccactctcccccctgctgatccggatttctcatatccgtattgacatataaggaaagcattttatcaggagattccgtcattacgtatttcaatttgccgatgagtgagtcaattgccattatagattcctcctttttccgctgctcactgttcctttccctatccgcaccgccttaaaaacgtcaatccacatataaacggcagacttttctaaaaaagtttttgcaaaacccatttacaaaccaagacatcatttactacaatggatacttgtgtttaactaagacttttacgctgtgaaaggagtatgattttgtttactgcagaagaaagagatcagaaagagctggaaaaagagcttcataaacttgaatttcagatttttagaatgcgggaaaatctgatagatgtatcaaaagacgcgcgagtgcttggtattgatcaatcgaacaatgacgattggatcattgtttcctcgattgatgatggccaaacatgtaagattatgctgactgattgtgaatcagcctaccggggaagaggctgtttttcactgatcgcttcttattatgacaatgccattcatatcggggacattaaaggcccgccgaaccatggctacggctcgatctgcatgaaatttttaaaacatatcgccagagagcagaatatcccgaaagtgacgggcgacatcgctaagcgtgattgggatcatgtcgacaggctcgttcatttttatgaaaagcatcactttgatgtctggattgacaatgatacgcaatcaggcggcattaaatgggtcgacctgtaaaaaatgatagataaaccctcgttaatatggtgtaatagattaaaccatttaaggagggttttttttgtatccggaaaaattgaaaaaaggtgacggcattcgtattgtgtctccggccacaagcatgtccgttatgtcagatgaaaatataaatgccgcgaagacaaaattggaggagctgggcttttgtgtctctttttcagagcatgcgaaagaaataaatgaatttgattcatcatccattgaatcgcgtgtacgggatctgcacgaggctttcgctgaccctgacatcaaagcgattttgacgacactcggcgggttccaatcaaatcagctgctccgctatcttgattatgaaaacatcaagcggcatccgaaaatcctttgcggctattcagatattaccgctctcggccatgccatatatcaaaaaaccggccttattacatattccggtccccatttttcttcatttgccatgaaaaaagggctggactatacgattgactctttcttggcctgctgtgcttctgacaacccgtatgaggtaaagccttcatccgagtggagtgatgataaatggtatttgaaccaggaggacagacgtttttatcggaatccgggaccgctcgttattcaatccggatatgcggaaggaacactgatcggaggaaatctatgcacgctgaatcttctgcagggcaccgaatactttccggagatggagcaagtgattctgtttatagaagatgattatatgtcggacattcatatgtttgaccgggatttgcagtcactcatccaccttcccgctttttcagccgtgaagggaattgtcatcggacgtttccagcatgcttcaaatgtgtctgaggaggctctgcgtgccgtcatccgtacaaaagaagaactggcatccatgcctgttatcgcaaatgctgatttcggccatacctcccctttgttgacattcccgatcggaggaacatgcaggatagaagccggctcagaaggcggacggatatggatcgatcggcattaatacataaagacgggaaaaacgccccgtctttttattttgacgccttatgccgcggcgtgcgcggagcgatcataattcgtccgccggccgctgccgtcacccatacggaagctccttcataaaaacggctgatctcttcattatatacggcatgtgtcagttcacgtttatcatgcgttccgtcttggttttttacgtttaaaataagcacaagctcgtgcctgccattcttcatcacgccagtacgtctcaccttttcaataacggctatccttcctctccctctgtcaagcgcctgaaacagcctgacagcaggcatagacagtccgataacgagcacaatggcgaaagcggtgcatatacctgcttgaaacaccggtgattctgtgaaggcattccataaacatataaattccggctccatcagattcatacatcccttcagattccgttttcacatccattccttattatattagagaaacgctttttctttttccgcatataacgattatatacagtcaaaaaagggaagaaaaaaagaacacaaagcatttcgccttgtgttcttcatctctatatgaaactagtctaatactttaacatttactgttctgacgccccagttgttagcgtcacttttctttgcaacaaatacgtcaattttatttcctttaattgcgccgcctgtatctgctgctgttgccactccgtaaccttcaacataaaccttagagccaagcggaatgacactagggtctaccgcgatgacttttgcatcagggtttttgtttaagtcaacaccggttgccgttacaccggaaatgccgccgtcgttagcagagtaagcagttgcagtcattgtcagctgctttttaggctcttgttggtttgtatttgattgaacaggctgctgttttgcttcgacagccttcgcttcttgtttaggttgttgttcttgaacaggttcttgtttaggctgctcgtttttgacagcttcttgtttcggctgttctgtctcggcagctggtttttgttcagtttgcggctggctggcttcttgagccggctgtgcagcctgagcctgacctttcacatttaacgttgtgcctgcgtaaattatatctgattgcaagttattcaagcttttcagattgccgactgatgttccgaatttctgagcaattttccagaggctgtcgccctgcttcactgtgtactgcccagatgtggttgtttctactgaagaaatagtcagtttctctccttcaatgattaaatcagaagataactgattccattcttttaagtcctttaggttcactccgtttttttgcgagatcccccagagcgtgtcacccttttgcaccgtgatttctttagcagaagcgtgagctccaaatgcagttgttgaaattgctgcaactgcgacaaaggacataatcgtcttcttcataagtaaatcctcccttgttagctttttattggcggctaacaggtgatatcgtaacatatgaaaatgtcagttcaataacaaaacgatttgaattagattacagttcctttacatgaaacatttctctcgcttggtaagtcttgctgaaaccttgatacagcaagggttttcaagcttctgattttcccggcgccaatgaaaaacacaatgtgcaaatttctaaaaaaactttttttcactctgtttctcttacataatttcggatttcttctaaaaaaaccgctccgtatttcaatcttttttgttccccgaccccttttacggaaagaagatcctgatctgttttcggaagtttcgccgacatttcttttaacgtctgatctgagaacacgacaaatggaggcacaccctgttcagctgcaatctctttgcggagacgccggagaagctcaaataattcatcattctcggtaacggcggcggcctgtaaggcttcttttctcgagactgcgctttttccaagcagaacgtccctgcctttttgggtgaccataagcgtcggaaatgtgccgtccgccattctgatatattcatctgaaataaggaattcgataaaatcactgatttccgctgcggattgatgcttcataatgccgtaagtggacaggctgctgaagccgttttccagcacttttttattttttgacccgctaagcacctgcgccaccatcgtttttccgaagcgctcattcattctgatgatgcatgacaataccatctgcgcttcttttgtgacgtcatgggcggtccttgtatcagtgcaattgccgcatgctccgcaagcttccgcctcattctcgccgaaatacttcagaataaaccgctgcaggcaatcttccgtatgacagtaatccaccatctgtctcagttttttgagatcctgcttttgtttttcttctccggcggccgattggtctattaaaaaacgctgcaccataatatcctgcggcgaaaacaagagcacacactcgctgttaagaccgtcgcgcccggcccgtccggcttcctggtaatagctctccatatctttcggaatctgcgcgtgtaaaacgaacctgatgttgctcttatcgattcccattccgaaagcggacgtagctaccatcacttgtatctgatcgttaagaaaccgctcctgctggtcttttctgtcatcatccgccaatccgccgtgataacggccggcattgatgccgctgcgttttaatttctcatataaacggtcggtttcttttcttgtcgctgtatatataatgccggcttcgtgtttatttttttccagataccgctcgataaaccggtctttgttttcgccctttactactttaaacgttaaattctctctggcaaaaccggtatatacagtttgttctttcttaatatgaagctgtttgcagatgtcatcatgaacctcaggcgtagccgtcgccgttaatgcgatgatgacgggcggttcttttagttcattaaaaaggatttcgatattccggtaactcggcctgaaatcatgtccccattgcgatatacagtgagcttcgtcaatggcgacaagaggaaccgtaatattctgcaggatgtgaatgaattcagaagaagtcaaacgctccggtgtgatgtaaaagagccggtaagccccttgcttcaaaccggtcaggcgctcatgaatgtcacggcttgtctgggtactgttaatataagctgccgcgatacccgcttcttcaagcgcgtcgacttgatctttcattaaggaaataagaggggaaataacgattgtggttccttcaaacagcagtgcgggaatctgatagcagattgattttccgccccctgtcggcataatgcagaccgtgttttttctttcctctgcaactgattgtatcgcctgcttttggcccgcgcgaagactgtcgtagccaaaataatgcgccagaagggattgggctttctccagcatatgttgtaaaacctcactttgtctttgattcttttattttatcatactgataaagtacgctgctcaagggcaattcaaaataaaaagccatctccgcaagggaaatggctttcgctacgtatgccgtacgcaagtaagaaagttttaaaccaccactcctcaaagtgggtgtttgcagaagcgttcctgtcgtcctctgcaatggaggcatgacattccggcttcgatataaaactccctattacagcttaaaggttaaaacttaattaacaatacgaacaatgtagcttctcttatatcctacaccatcagtcgtattttggcaagagggttaattcttttacagaaaaccttttttctttgtgaaaaatgctttattctacataaaaattgttttttcgacaagatatcaatatatcaatataagatcagatcgaaagcttccgccagtttcttctataatagaaaaaactctcacaccctgtaggggcgcaagagttaatgaaaattagaattttgcagccagatctttcgcttcttgcagtcctttttcaatgatcgcttgagcgttatccggtgcagcattatggccttcaacgacaacagtgtgaagatcttggacaccccagaaaccgagaacggttttcatgaagtttaatgacatttcaagagatgccatcggtccttcagaatatacgccgccgcgtgcgtttaagagcgctacttttttatctcccatcagacctttagggccttcaggcgtgtatgtgaaagtaactcctgcacgagacaggtaatcaacataagtatgaagcacagcaggcactgtgaagttccaaagcgggaatgcaaacacgactttgtcagctttgacaaattgatttaagtaaatgtcagcagttgacgcttgttttttctcttcgtctgtcatttcaattccttttgaagctttaaatgttccgttaatcatatctcttccgaggtaaggaaggttttctttatgaagatcaagttcgatcacttcatcattcggattgttttctttataagcagccagaaacgcttcgtataattttacggatacgccttcttcagccgtacgatcacttgattttacaaataatacttgagacattctaaattcctcccggtaatcttttaatatttacttacaaatagtatgttactttcttttttatataaagtcaatgattttatttcgattttgagattttttatggaataaaaaaacaggtacatatgaatgtacctgctgctattattgtgaatcctgctcacgatccaggatttcgtatgtttgtgagcttttttgatcaacggtttctttatttgagaggtctttcacctgctcgtgaaattccctttcatatgacggagcgtctgttttcacatccccttctgtttctcgctgcgcttcgacggtcattctggcgtacggtacggctttaagtctttcataaggaatttcttttcccgttttctcgcaaatcccgtatgttcctttatccattcgttcaagcgcggcgttcacctcatctaaaagattctgatcgacaccgtccagcgtctgattcgtgaccctgtccaaataaatgcttccgtgatcagctaagtgattatctactccgttcgacagttctcctgtgtcttcgctcattgaatgattttcttttgattctccctgaagactttcctttaaatcgattaatttatgataaaggctgtcctgctgttcttttgataatgacatattcatcatctcctttttcgtctgtattcttcgctgcatctgttaatacataccctcgaaaaaggaggctgaaacaacggggtcaatgctttctccccctgatggtgacattgggtgtctgctgctttgtctgtcttttttctttcgcaggatcattttgccggttgtcccgaaattcttcagcgcaggcttgtttgagcctgtgcgccggtgtatggtaagtggcgccgatattcagcataccgctcagctcttctatactcagcttttcaaattcaatattgtattcaaccttgtccactttgacgtgctcaatatggacatatgttttttctccttccaccgtctgcggatcaaaatgacacttatcctgaagctcatcaagctgttgttccactttcttaagccggtctaattcttcttcacacacttttttgaaaatctctttcattatttttttcaaagaaaatcacttctttccccgtcactcttggaaagttctatgcgtcccgcattgcgaatatataaacatgatatacaaaaaggaggcgaatcatgatgttttttccatccgttatcaattttgagtatataaaaatgaacggaatcagcggcggagcagcttttaacaccggctcttccgttatggtgagaaacacagcagccaataaaagaaatgaagggtacggtgaacaaaacggtgattgcaccgttgtcgtcatccctatcatgagtatcgatgattcagatctgatagatggcacagcaaacaagatcagccttcgataatgatctggcttgcatcccccagatgtttagcaatcgatatatataaaatcccgtctttgaataccgcctgcattccctttgttccctgagcggaatgcggaaggtcgagttttttttcaaaatcgccgtattttccggtcttctgtttaaaatcctgttcattaaaaaaggattttctcgtgccttttacgacgatatattctccgtaggacagcagctgaacatcttgtttccggtagccgggcagatacagtaaaaattggagctcatcatgggtttccacaatatctataagaggaaaagcatcctcatttcttctcatttgcccatctccctgttgaaagggaaaatgagaatggccgttttgaaatgatttcagttgttcatcatcaaaaacgtttttccaaaagtcgccgccggacatgttttgcgccatttccatccattgcttcatcttatcgaaatccatttttatcgccccctgtctaagcatacggtcataacagccggcatacacctgtattaaaggaggtttgcctgtggttcaaccaactccatatatcaatattaatattttcatgttgaaaattaattcctttgaaaatgcttcagcggtgaatgtcggacaaaatttactggcggaatggcagaattctgataaaaagaatcagggatacggacagaacttcggagatgcaagcggcttcatcggcacgaacggcaaagtggatgaccgggatcaaattgattctccatctgcctttgagtctgcatgcgataaaatccctgccggaaaaggaggcccattatgatgttttcgccggttttggtaaatgtaggaggctttaaagtaaatgcagtcgaccgcggttcttccattacgatcggcccgtatcagcaaatcgattattttttatccaataagatcaactacggattcggtgaagaaaatggtgatttggcgccgatttatatccccatcagttctattgctgatccggatctcattgattcgaactccggaaaaacaagcattatataataaaaaggccatccgcatgcattcggatggcttttatgtgatatttaactgcataagtattttgttaagatggcttgaacctcagtcaagtccgtttcttttgcaaattccaattcgaaagtttttccccttgtcattaatacaagcccggtatctggatcaaacatccccgcttcttgaatggcgaagctttcaattgttttatatggaagaaatacgcgcactttctttttggagaacattttattatcaaagaaaatcactcgtttattcgtaaagcatatttggtcaacccgcagtttataaatcgtttcgatccgttctccctcaacgagcaaagcctccagcttttttgtgtcggttgatctgctgacagaaaaaattcccaatgaagaaccccactttctgcttctatactattgttttattacaatcataaaaaaataagttctttatccctatataagaatacgacatagacggcatttaaaccattacgaacagattacatttttagaacgttcatcaaaaaagcccttcgcgaaaggtgccgctgttatgaagtagtacggttcagcgaaagaaaaggtttcaagaaaacggtgtttttttcgaaaagtcagttttttatttccgccataaaaaaccgcggcttctccaatgccgcggtttcaacaaaacatcaacgatccgtatcttcaattgttccttctttataggtatctgaaatttgttccatcgtcgtgtcggtgccttcttcaggttgcacttgctgaagctgatctgatgttttattttgtttgtcttgctctgtttttttcattttgcagccaccctttatatgtagtcttttttagtatggctcaggcaaaataaattcattcagctttaaacttcttcaaaatactctttgtagaagcctgcgactttgtttgtattgtctacaacaaaaatgaattcttctgtttcatttttgacttcatactctttacccggcgtcagcacatttttgacaatgtattttttcgcatctgtatgtacgcatttgacctttttgacgctttcttttgtctgccaattattatgaatcatttataaaactccttttcttaatcgataagcttattgtagccgttttttcttgtgaattgcaataacggttatcaattgattttaccggggctgttattatagaatgactgtatgcgcttactttgcgcggacatcaagatgctcaaaacagaccataaaaaaatttcgggaggtttgttacgaatgagttctttaacgatgcagatcacaaaaaggctggaaacatttttacagggcacgaagaaactttatattgacggaaaatttgttccgagcgcttcaggatcaacatttgtcacaccgaatccggcaaccggagaaacgctgatgacgctttacgaggcacagacagaagacattgacagtgcagtgaaagcggcacgcaaagcctttgatcacggcgaatggcgcactatgccggccgcttccagaagcaggctgatgtataagcttgccgatttaatggaagagcacaaaacggaactcgcgcagcttgaaacacttgataacggaaaaccgattaatgaaacgacgaatggggatattccgcttgcaattgagcatatgcgttattatgccggatggtctacaaagataaccggacaaacgattccggtcgccggctcatattttaattacacccgccatgagcctgtcggcgtcgtggggcagatcatcccttggaacttcccgctccttatggcgatgtggaaaatgggcgccgcccttgccacaggctgcacaatcgttttgaaaccggcggaacagacaccgctgaccgccctctatttagcggaattaatagatcaggcgggcttccctgacggcgtcatcaatattgtcccagggttcggcgagacggccggggaagcgctgaccaaccatgacgatgtcgataaactcgcttttaccggctctacagaaatcggcaaaaaaatcatggaaaaagccgcaaaaaaaattaaacgcgtgacactggagcttggcggaaagtcacctaacatcattttgcctgacgccaatttgaagaaagccattcccggcgctttaaacggggtcatgtttaatcaggggcaggtatgctgcgcaggctcccgtgtcttcattcacaaagacaaatatgatgaggtcgtcagcgaaatggtttcatatgcgaaatcgcttcagcaaggcgccggccttcaccaagatacacaaatcggcccgctcgtcagtcaggaacagcatgagcgcgtgctttcatatattgaaaaaggaaaagcggaaggagccaaagctgtcgcgggcggcagctgcccgtttgaagaagggtattttgtctccccgactgtatttgcggatgtggatgacagcatgaccatcgcaaaagaagaaattttcggccctgttttagccgccattccgtatgatacggtagatgaagtcattgagcgggcgaaccgctcggaatacggccttgcagccggactttggactgagaatgtgaaaaacgcccattacattgctgaccgtctccaagccggcaccgtttgggtcaactgctacaatgttttcgatgcggcatctcctttcggcggctataagcaatccggcctcgggcgggaaatgggctcttacgcgctgaataattatacagaagtgaaaagcgtctggatcaatctggaagattaatcaaacaagaaactgctgcctgtcagcagtttctttcttttgtcatgccgccttttacatatgaatatatatgcttctgaaggagttgagcgagtgtgagcacaattcatgaaaacgtcagaagccgccaaaagaaaaccatctccctattaagagaaacgcaaaatgcggacggctcatggtcattttgttttgaaggaccgattttgacaaacgcctttctgatcctcctcctcacttctcttggagacaatgataaagaactgatcgctgagcttgcagaaggcattcgcgctaaacagcgcccggacggaacttttgccaactatcctgatgaccggaaaggaaatgtgaccgccactgtacagggctatgccggcttgctggcttccggtttatatagccgttctgaggcgcatatgattcaggccgaacgctttatcatctcaaatggcggcttgcgcaacgtacacttcatgacaaagtggatgcttgcggcaaacggcctttatccatggcccgcgctgcatctgccattatctttcttagtcattcccccatccttcccgctgcatttttaccagttcagtacatacgcccgtattcattttgtaccgatggccgtgacgcttaacaaaagattttcgctgaaaaatcccaacgttccgtctctcgcgcatttagatcggcatatgactaaaaatccgtttacatggcttcgttccgatcaggatgagaacagagacctctcttctcttttcgcgcactggaagcggcttttgcagaatcctgccgcttttcaccagctcggtctgcgtacggccaaaacgtatatgcttgaccggattgaagaagacggcacattatacagctatgcgagcgccactatttttatggtgtacggcctgctcgctctcggtgtatcgcgccactcccccgttatcagaaaagcacttgccggcacgaaagctttgctcacgtcttgcggcgatataccgtacctggaaaattcaacgtcgaccgtttgggatacggcgcttctcaactatgcgcttatgaaaagcgggatctcagataacgatcagatgataaccagcgccgcccggtttctgcgtgaacggcagcagacgaaagtcgctgattgggccgttcacaacccgcatgctgaaccgggaggatggggtttttcaaacatcaatacaaataatcctgattgtgatgacacagccgcagtgctcaaagccattccgcgaaaactttatcccgcctcatgggaacgcggactgagctggcttttgtccatgcaaaacagtgacggcggcttctctgcttttgagaaaaatgtcaatcatccgctggtccgcctgctgccgctggaatcggctgaggaagctgccatcgatccctcaacaagcgacttaaccgggcgggtgctgcactgtttaggagaagcggggctttcttctgatcaccctcagattgaaaaggccgtccaatggctgatccgccatcaagaagaggacggatcgtggtacggcaggtggggtgtctgctatatttacggcacatgggcggcgctgacagggatgaaggcttgcggcgtgagccaaaaccacccggccgtgaaaaaagcgattcgctggctgaagtccattcaaaacgaggacggaagctggggggaatcctgtataagtgcagaagagaaaacctatgttccgctttcttacgggacgcttgtacagacggcttgggcggccgaagctttgctgcaatacgaaaaaactcatcatcaagccgtcacaaaaggcatatcttttcttattgaaaaccggcattacgaaggagccgctttcagctatccgaccggaatcggcctgccgaagcagttttacatcaggtatcacagctacccgtatgtgttttctttgcttgcgctcagcacttttatgaaaatgagtgaaaaggaggaagaaaaatgaaacggcacgcttatcaaaccgagatgctgaattggtgtgaaaccttgaaggaacaagttattcagcaaggtcggttcgatcgcttcgcggcacaaatcgaccggatttttcacacccttcaggatgatggattaacggaggcggaatggtacgaacaggcatcggcactttaccgggacattactgaacccgaagagccggatgagcgcagagcttatgtgccgatcggcaagcatgtcctccctaaactgccttacagttattccgcactggaaccgtatatttcaagagagattatgaaactccaccataccaaacaccatcagagctatgttgacggtctgaataaagcagaactagagctcaaaaaagcgagacagacgaaacagtacgacttagtggcacattgggggcgacaattggcgtttcacggcgcgggccattatttgcacagtattttctggttttcgatgaatccaaacggaaaaagacggccgacgggtgcactctttcaaatgattgatgtgtcattcggaagctactccgcttttaaagagcaattttctcaagcggcgaaaaaagtcgaaggagtcggctgggctatcctagtctgggcgccgcgcgccgggcggctggagattttggccgctgagaagcatcagctctacagccagtgggacgtcattcctttgcttccgctggatgtgtgggaacacgcttattacttacaatataaaaacgaccgagcggcttacgtggatcaatggtggaatgtcgttgattggcgggaggcggagaaacggttcgagcaagcgcaccgcgtgatatggccgctttattaaaaaagcccccgtcttgaacgggggcctgcttcttttggtttaaaaaataccaagcacgtgcagaaaaacgataataatggctacaggagccacataacggattaataggagccagactgcaaaccattttcgttttataccggaaccgcttttcagttcgtcaaacagcatctgtttcgggattttcaacggtacgaaaacggcaattaaaagcgcgcccagcggcattaagacattgctgaccagaaaatccgcagcgtcaaaaatactgcggtgaaaaatagaaacatcactcaaaattccgtacgacagcgccgaagggaccccgacaataaatatagcaagtcccccgatccatgcataccgcttccgttttgccgaatcgccttttgacaaaacagcaactaaaatttcaagcattgaaaaagccgatgtcagcgtcgcaaataaaaacagcagcaaaaaggcgagtaaaaacacgatgcccaacggcatttggttaaagacggtcggcagcacgttaaataaaagctgcgggccttgatccggcttgaggccgaatgcaaacaccgccggaaaaatcgccactcccgccatcacagcaacaaggacatttaataccgtcaccgatacggcggattgaacaatattttcttctttttctaaatatgcgctgtatgtaaccattacggacactccgacgcttaacgagaaaaatgattgtcccatcgcatataaaatggtattggcatccatcgcgccaaaatcaggcataaaaaagaattttaatccttttgctgcatcatgcagtgttacggagcggatcattaagagaataaacagaataaacagagccggcatcagcacctggctcactttttcaatgccgctgctcaccccttttgccacaactaaaatcgtcagcacgataaacagcagctggccgaaaacggctgcataaggatttgaaatggtatcgataaataacgtatcaaatcccgaagaaagcgataagccgcctgtaaagccttttataatgtagattaatatccatccccccactacgctgtagaaggataatagaataaaacacgtaatgattccgagatatccgatccagtgccactttttccccggcgcgagcgccttataggattcaacggcgtttttttgtgtttttctgccgataataaattcagcaagcaaaagcggcagtccgattaaaacagtaaataaaataaaaacaagcagaaaagcgccgcctccgctggttcccgctacgtaagggaacttccatattgcgccgagcccgattgcagagccggccgtagctaaaataaatcccagcttagatgaccattgattagcttctttcacttcagcactcccaattcatttcagtataaaaatcaattgtaagaatatatgtctgaatagtcaagaagatgttagtttacataataattttattgaaaacttatatttaatattgaattattcagaaaattatttataatggaatacagaaaagtcagtcatattttctgactgatttaatgtaaaaggagctgtgtttatggaatggctgaaaaaaataagcgggtttgcgggccaaacctttggcttgtgggttatcgtctttgccggtttaggattcgcctgccctgatttgttttcttggatcagttcttatatgacgattttccttggtattattatgtttgggatggggcttactcttcaagcagacgattttaaagaattaatcagaaagccttggcatgtcgtgatcggagtcgcttgccagtttacgattatgccgcttacggctttctgtttatcaatcgggctccgcctccccgcagaaatcgccgcgggcgtcattctggtcggatgctgtccgggcggtacggcatcaaacgtcatgacgtttttggcgaaaggcaatacggcgctttctgttgcggtcaccacgatctcaacattgcttgctcctattgtaacgccggcacttattatgttgtttgcgaaagagtggctccccgtttctttcggctcactgtttgtttccattatgcaagccgtgcttttgccgatcgtcctcggggtgattgtgaagctgttcttcaaaaaacaggtcggacaagccgtgcacgcgcttcctctcgtgtcggtaatcggcatcgtagcgattgtatcctctgtcgtcagcgtaaatcgtgagcatctgcttcaatcaggactgctgattgtgtctgtcgtcatcttacataacggaaccggatatttgttaggattcctgactgcaaagctgttcaaaatggattatgcttcacaaaaagcgattgcgatcgaagtcggaatgcaaaactccggactgggcgcagcgcttgcgacagcgcatttctcccctttgtcagccgtgccgagcgcaattttcagcatatggcacaatctgtcggggtctgttcttgccacctactggtctaagaaaaaagagaaaaacagcgccgaagaagaagaaacggcaaagattccgttttcataactgaacaaggataggctgctgccgctcctatccttgttgattctgcagatcacgaatcagacgcaaaagcgctttttttacatccccctgaaataaacctccatgataacaaatcaattggcggatatcataatcgagcagccgctgcacagaacggaccgcatcatccatatgtaacgtatagccgggattagcaaggttcagctttccgtcttcaatgacgaccgcatcacctgtgaccatagttttttcggcaggcagataaagactgatatggccgggtgtatgacccggcgtggctacaacgcgaatgcctccgcaccaaggcagcagctcgccgtcagtaactgtccggtgaactggagccgattcgactgattgaagagagcggatgaactgttttgcatagggctttgcatcgtctggcaatgaacaaaacgttgattcagcctgctcaagccgtaaagattttttagagccgtcaatatacggcgcttcacgctcatgtactgtcacgctgacatccggatgtaaacggtataatgcagcgagtgagccgatatggtctatgtcgtgatgcgttacaatgatttttgtcaatgaatgaagcgacattccatgccgggcagcggcatgttgaagatggtttgtaaaaccgggatatccgcagtctattaatatcgtgtcatgttcgtcttgcagaagaaccggagtgatagaatgcaattcttcattatattcaaattcgatctcaagcggataacagcttttcatataaattctccccttctctcaataaaaaaagtacactgcttggggactgacccccgtttttgagacagggatcaaaacacctttaagcagccagctgtcggtatgtgaccggcggctggttgtttagtttcgtttgaatacgaatgttgttataatagtatatataggtttcgacagtttgctctacgatggtcgtcgtagtgctttccaacctgtcgaggtagaacgtttcagactttagtgaggaatgaaacgattcgatggaggcattatcagcgggtgtccctttgcgggacatgctcatggtaatgccttttgttttaacagctttctgatactcataagatgtataaacagaaccttggtcactatgtaacacgcagttctctggcagtacgggcagctgatcaagtgtgtgtaagacaaaatctgtgtcctgtctatcgccaatcgtaaaagcaatcacttctccattgtataaatccaatatactggaaagatacaattgtttctgcccataaggcaaatatgtgatatccgttactagcttttccagagggcgatcagactgaaagttccgatccaatatattatcggccacggcatatggctgcccatccttcttgcgctttttcaccttaacccgacactgccattgatttttctgcataatacgttgaaccgttttatggttaatacacattctcttttttagtatggctgtgatttttcgatagccatatcgatacttgtgctctcggcacaacgtgccgatttgtttttccaaatggcgcttgggatgatccttcatcagattcttcttccaacgataataagacgctcgagagatacctaaatgaatacagatatcctgtacggtcattgtgctgtgcaatatttctacaagttcgactgacgtttcgctatcaacttcctttccaattcgttgtacttttttaacacttcattctgttgtctcagataacgattctctgcctggagtttctctaattcagaagaatactccggaccctttccataagtatattgctttccaacaggctgttcgaatcggtgggtatccccagccttatgccatctaacccatgtctgaacctgagtcttatttttgatattcaattcctgcatgatctctttcataggcacgcccgccaatctcattcctacagccttctgtttgacttcaaccggataactcactcttgtccccatagaaaaacacctccaagttttatttcggataacaacggtccgttttcaaacttgaaggtgttttttgtttgtctcatattatggggtcagttccccttgtaagggcagtgtactttttgtctgtctcaaattatccttccagcaacagctgttccggatcttcaagcaggtttttaatggtgacaaggaatccgaccgcttctttaccatctacaattctgtgatcgtatgataaagcgatgtacatcatcggacggttttcagagcgctccgcatcaatcgctactgggcgcagctgaattttgtgcatacctaagatcccaacctgagggctgtttaggatcggtgttgacataagcgatccgaatgtacctccgtttgtgatcgtgaaggagcctccttgcagctcacctaatgttaatttattgtttcgcgctttcttcgcaagttcgccgatctctctttcaatgccggcaaacgtcaggcggtcagcgtcacgcacgactgggacgacaagcccttcttcagccgcgacagcaataccgatgtcatagaattttttcacgatcagctcatcgccttgaatttcagcgttaaggagcgggaattttttcaatgcagccacgacggcttttgtaaagaacgacatgaaaccgagtttcacttcgttttgctcaaggaattggtctttgcggcgttttcttagattcataacggccgtcatgtcaacttcgttaaatgtagtcagcatcgcagaagtctgctgcacttcaaccaatcgtttcgcgatcgtctgtctgcggcgggacattttttgcacttcgacaggtttgtcaaagctttgctgtgtttttggagcctgctgtttcggctgtgccgcaggttttgaagccggtttttcataagcttccacatcttgtttgcgcacgcggccgagcgggtctcccgtcggaatttgtgatagatcaattcctttttcccttgccagcttgcgtgcagccggagacgctaccgttctggatttcgcttctgattgtgcttcctggctgacttcttgtgcagcaggttcagcttttgcttcctctttcgtttgttcattggctggagcactttctgaaggggcgggtgcagaactttcgccagcgccttctgtaatggtaccgataatttctcctacttggacggtatcacccgaatctttcaatacctcttttagaacacccgattcttctgctgtcaattcaacatttactttatccgtctccagttcaagcaagtactcaccctgttctacataatcaccgggctgctttaaccattgggctatcgttccttctgagattgattctgctaattcaggtaccttaatttccgccattttttcatttcccccttagtttttgcgagtcaagctatcagatacaatgcgttcctgttcttttttgtggactgtcggatctccttctgcgggactggatcgtcttcttcggccgatgtattggacatttactccttttggcgcgatttccgtcagatacgggctgatataactccatgcccccatgttctgcggctcttcctgaacccaaacgatctcttgcaggttcggcagtttggcgaaaagctccttcgtatcttttgccgggaacggatacagctgttcgattctggcaatatgaagccaatccttatcgccttccattttgttgaagtgatcgctgatatcaattgacacttttccgcttgataatacgacgcgagtcactttttcgtaagcatgggaaagaccggactgctcatagacaggcttgaatcggctttcgctcagttcctgcacttcagataccgtattcgggttgcgcagcaggctcttcggcgtcatgatcacaagcgggcggatttcctcacgaagcagcattttcgcttgtcttcttaaaatatggaaatactgagccgcacttgtcaggttggccaccgtccagttgttttccgccgccagctgcaggaaccgctcgacgcggccgctggagtgttcagggccctgcccttcgtaaccgtgaggcagcagcatgaccagtcctgatttttggccccattttgcccgtcctgcagatatgaattgatcaaaatagacttgagccgcattggcaaagtccccgtactgcgcctcccacatcacaagcgtttcaggcgaatacacgttgtatccatattcaaagccgagaaccgatccttcagagagcgggctgttatgcaccgtaaatgaagcagcgcagtcgtctaagtgatggagggcaacaaattcttctcctgtttcgctgtcatgcagcacaaggtttctttgagcgaacgttccgcgctctgaatcctgtccggtcagccggatcggcgtgccgtctttcaaaatggaagcaaacgcaagcgattcagccaatgaccattcaactttacggtcatcatcaaacgcttttgcacgtctttccagaattcttttcagcttgccgaacacgttaaaagattccggccagttgataagttcgccgttcagcttgcggagaacatcaaaatcaatggatgtgtcaacatctggaaaaccgttggacaccggttccggcaattcaatttcccgtacggcgtcttcttttttggcgggcacctttttataggcgtcttcaattcgttttgtcactgtcgtttcgatgttttgcgctttttcctcgctgatcagtccttcacttacgagtttttccgcaaagatccgcttgacagtcgggtgttttctgacggcgtcatacagcatcggctgtgtcgttgacggctcatccatttcattgtggccgtaccgtctgtacccgattaaatcgattaagaaatctttattgaaccgcttccggtattcaaccgcaaatttaacggctgacaggcatgcttccggatcatccgcgttgacgtgaacgatcgggatttcatagcccttcgccaaatcactggcatatttcgtggatcgtgattcatcgctttcagttgtaaagccgatcatattattggcgatgatatgaatggccccgccgacctgatagcctttcagagagcttaagttcagcgtctcggcgacaatgccttctcccgggaacgctgcgtcaccgtgaattaaaatggcgagcgattttgtttcgtcttgaaccgggtaccccttttgcgttcttgtttcctgtgccgcccgcgtgcttccttcaacaatcggattgatgaattccaagtggctcgggttatttgcaagcgtaatccgcgcgcttttggtttcagcatcctgaagctgtctgtctgcaccgaggtggtattttacatcgcccgtccagccgtagctgatgccggtcgatccttcagacggcacaaggtctttattcggcgcgtgctggaattctgagaaaataatctcatacggtttgccgagcacatgcgcaagcacatttaaacggcctctgtgcgccatcccgatattgacattggttgtgcccgctttcacagactgggcgataatgtcgtcaagaaccggcacaagcgcgtctaatccctcaattgagaaacgcttctgaccgacgaatgtccggtgtaaaaattgttcaaatccttctacttccgtcagtctttctaaaacggctgacagtttttccggtgaatttttccggaacagttctccggattcgaccatttttgtaatccatgcacgctcttcgaaatcatgcacatggtcaaactcgaaggagatggttcttttataggtattgcgtaaatgctggatggcttctaagccgtttgttatattggcaggtgcgtctttacagatgacagacgcgggtattgctttcatttcttcttctgtaagcccgtactcggataacggaaagagctcgctctttttcggatcctttctgagcggattgacggaagcgttcagatggccataggttcgaatatcttctgcaagtttaactgctgctgcgatcttttgaatcagatctgcggtgacgcgtccctgttcctttgttcccgatgcctcttttatttggcttggcggagcgccgagttcgtcaaacatgtctttcagatccggatcaatgctgtctggatcttcagcatattggtcgtacagctccagtgcgtagccgaggttcggtccgtaaaaatcttcccaattcattctttgtttcatattattttgaaacatttgaatattacccccaacctagataatcaagtgatcaattcactatcttgaaataacttttgaacgctgtgcccaaaattatgtaataaaaacgcttccaaggatattttaccactgattgcgtttggattctaccttgattgttcacaaaatagtaaaaaaaacagatcaataccgaaaaaattaaatcattttaaaataaaaagcgaaaaagcataggaaaaagcctatcctatgcttttatgaagcagttttttcaagagcggatacagcacatcgggcagctgatcgacatccggaacaaaaatactgtactttccgtacatatcctgaatggttttcatctgtgattcctctatcgcagtattggacagaaaaacatttatgacttctatccctttttttctcgcttcgatgacagcctcgctcgtatcgacgatgccgttttgttcgtatccgaatgctgccggctctccgtctgaaaacacgattaaaaatttttgcgcctcactccgccgcatcagctgtttcgtcatttgtctgatggcgtatccgtctctgttatcttcttcaggcgcaagctgcatgatcagcggacccgccgcctgcagcagcgactcttcaaacggaatgacggtattgaagaaattcggctggctcgtttcggtcgcttcgtttgtatcctcccaaaatccgacgatctggtgcggtacggacactgatttcaaggcttcatgaaaaagaacgatccctctttttgtttcatccattttgtcgaacatgctggccgaacaatcgacaagcaatgtaaaaacggcgtcaatgtctgaagacgggtcctgctttttatagaaaaggcgcgggttccgctccgtaaaatagcggatcagtttgcgattcagccggcctgcgtgaaggtcagtccgcgggagcgtttttttgtgctcaagtgttttttgtatcatctgcttcaggcgtttttgatatgattctatcgtttttgcctgttctttataagattgctcctcttcaggagacgctttatgaggcgtttgataaaccgggaaggcaaatttgttttcttttccgtcagccagccccgcgccctcatgttcatcctgaatggattcaagcgcttccagtttggagtaatcctctcttttcgtctgacgtgcggaaccttggacggagccgagcgcctggtcaccgtcatcgccttctctggccgcgtctttcccaagatctgatttcgcgccgtgctcaatatcaaattgaaggaaactttttgacggcgcttcggtttcccggtgccacgtattcattttctcttcaaggatttcttcatctccgtcggaagactcagggagcgtgagatcgtcacttaacgaaggcgctttttttacgctttcgaataaaggctcttcagccgctttttcgtaatcaagttccggcagaaaaaagtacgtgttcagcatatctttctcaagcacttcatcaaggccttccatgaggtcttccgttatttttgcgatttgttccgtagaatccgcctcatacacccggatgagctgacgttcaatatacggtatcatcatatcaatatgttcatgcatggaaggaatgccttcaagcggagactcagccgtcagcttgacaaacatcgcgcaatacaaagcgtcggtgaaaatgctccgttctaaattcaatgtcagctgcgtcgtgaaatatttcctgtacatctccctccgcttctgaaaaacacgtttcgttcccggccgttcttttttgatcagctcttcaattctgatatcctcaagcagcataaacagctgcttggcaaagctttggcgggtaaagtgccggtgaacgtcatttaaaaaccccgcaaattcccgaaatgagctgctgcgtgttccgacagcgcgcaaatagacatcgcttttcaggccggcttccatatccccggctgatcggtctttccaaaagtggctcatgtaaattttcttttcaaagggattgtagtaagactgcacgccgtattccacttcaacttcactgcttctggtcagtgttttggccagatcagtcagcatcatgaacaaaaacgaatcaatcgtgctgtcattaaatttgataaacttcattgtatatccctcattcgaacagcgtttctgcaatatttctgacagcggctttttccctgtcgtcgtcaagtttttctacgatgcctctttcaatcgcccgtttcggcgggatgtacgcagccaagtcgcacgtatcaatgagagccctgatggacgccgcttcttctgacacttgtccgttatgcgcttgtgcgattaaatcagaagacagcgtcataaaacgctcaattaatttctcatcttttaaaacagactgagaggtcagcacctgtttcaggaggcttcctttaatatacggaacatcaatgatgacaaaacggtttttaagggcttcgttcagcggaacggtgccgacgtagccttcattaatcgcggcgataacaccgaatccttcgcttgccttaatcacttctcctgtaaagggatttgtcatcatttttctgtaatctagcacgccgtttagaatcggaagggtttcaggctttgccatattgatttcgtcaatgtataaaaaatgtccctcgttcattgcggttgttacaggtccgggaacgaattcaattgtcgcctgtccctgttcattttcaatcgttttatagccgacaagcgcttctgcatcgaggtctacggagcagttgacgctgtgcatcggtttatgaaaatagttcgaaagcgtttccgccaattttgttttccctgaacccgtcggtccttttaataagatattttttcccattgtcaaagcaatgacggcatcgaatacaatcgctttatcttcggcctcatagcctgatgatccgattaaatcccggaattcttgggaaacgggatgattttgataagcctgcagtttgttttgtatatcttccggaagtgataggtgctgtaattctgaagtcataggtgatgtttcctttccatttgtattccataaccgagtatactaaaaaagcccttgtatactcaatacaaaagggctcattccctgcgggcgctttttgtcaggggagcgcaggcgattctggctccggaatttccgctcgggtttgtcaaataatcgtccgtatattcatgaatgacgaacgcgcttccgtcccgatcgagcaggctgagtctgctcccttcttttaatgaagtttgcggcgcgttcataatgacatccactttaccgtcagcccccacttcaagattggggagatccccggcgtgatgacccatcggattgttgaagccgtgttctttgttcaaagggttgaacggaccgccggctgattcgaaatcaggtgcctgacatgtccctttttcataaatatgaaatccgagagaagtgccgggcggcagatgccccgctgatatatgaatgtctgacccttcatcatcagattccctcacttcgatatatccgatcgtttttccgttttgattaatgagtccggcatgctcacggtatgcagatgcttccaatgcgcggctttccccatgttttttgggcggaacaggagcgggtctccccccgcagccgcaaagcgtaattgatgcgagcatgagaaaaagcaagagacgattcatgcttcctcccccttattttttacccatcagtcttgtcaaaacgtaaaaatggtaaacaaaaaaagccccgaaaggctttttttaaaaataactgcgcgctcctaaataagcttttttccaatacggattgcttaagtttgaaacttcaaccccggaggagcttgcgtgaataaaatctcctccgcctaaatacattcccatatgagaagggcccgctttatatgtcgtaaagaagacaaagtcgcctgctgacggctggctgatatgtttcatcgtattccaatatccggccgtgctcagacgggaaacagagcttaccttatttaaaaggtaatagatgtaaccgctgcaatcgaagcccgcaggcgtattgcctccccagcggtaaggcacgccgacatgttttttcgcctcgcctatcattctgtcaatctttgaccctgtcaccggaggttcaggagtattcggcttgtttggttttgccggtttgttatccggctgccgcacaggatcttctgtttttcccgttccgttaatcaccagaacttgtccgatttgaagcacatcagttgtcaatttatttttttctctgatgagctgagcggtgatgccgaaccgattagcaattttccagagggaatcgcctgcttttactttgtaagtggatggcttctcagaagggtttgaatgagatggcggtgttgtgccgctgtttccgttatgtgaagaacctttgatctttaacacttgattcggatacagcatgtctgatgttaattgattcagctttttcagctcggcgatggtgatcccggtttgattggcgattttccacagcgagtcacccggcttcacagtgtaagtccctgatgcgcctttatcaggctttgtctgtctgccgcctccgtcgtccgtgccgccggcagaccctttaattttcagtttctggccgggatagatgacatctgaactcaaacggttcaggcttctcagctcagaaacgctcattttgtatttttttgcgatcacccataacgagtctccgtatgtaactgtgtaggcacccgtgcttcgttttcccttttgccccgttttatgtgtgccgctgccgtcgggaatgtgcagccgctgtcctgggtggagtatcgttgatttcagtttattttccgcctgcagggctgaaatacttgtatgatattgccgggaaagcttccaaagagagtcgccgctttttacttgaatggtttttgcttcagcgggatgcacggcgaaggttgaagtcattactgcagatacagccagtccggctgcgattttttttttcatataacgaaaaacctcctatttatcattgctgaaagggacgttccttttctttggacgccgcctgttatgcaggattcattcagaagtcgacattaattccgattcatttggccttagatcatcaccaatgccacacattttacataaattgagaacatttcacaaaagactttggaatcattttcataacatggcttttttccgcgacattccacctttcttgtctgtttttcatacaattctctttacggcgtgaaaaatcctcccgaaaaacaatcaaaaaaagcccgcttcctttaaaggaagcgggtgacggctgattacagaacccgggtctcggcagttttcacgtcttctgctatcaattccgctgcacgctgtgctccgccggccgctttcagggattctccgatttcagaagcttttgtctgatattcaggattttcgctcaattcttttattgcttcagtgagcagttccgctgttacatcttcttttttaaacattttgcccgcgcccgtgttttccacttggcttccgacggcgaactgatctgcgcccatcggaatgacgatcatcggggttttgtagtaaagcccttcgctcgtactgttcattccgccgtgagtgataaataagtccgctctcttcaggatctcaagctgcggaacataaggcttgacaatgacattctcaggaatttcatcaagctccgcaggatcaagatgtttgccgattgacatgacggcttttccgttaaagtttctgaccgcttttaagcatttattaaacaattccttctgattgttaaaaatcgtgcccatggaaataaacaggactttttctcctgcaagctgttcaaacgggaaatcttgagccgccgccctttcggttatggacggaccgacaaagagataggaatcgccaaactcttcttctttcggctgaaacgctcttgaagtaaatacgatggtttttctgccgtcatttgagaaaatatcatacggcgttttaatgtctgcgctgaattcttcattgagccggctgaccgcttcggtataagccggataatgagatgattcctctgatacaaggtttgtatttgaaaacacttctttaataaatgcttcattcattgcaaatgtcgtacaaagtgaatatgccggcagtttcagctggtttctcacgagccttcctgccagaaaatgatgatcatacaggatgtagtcgtaggattcatcttttacttcctcaagaatacggagtgcggcttttttggaagtctcaatcattaatagcaaaaactcggtagcgtcccgctgttcatcacccgttgcgttttttccgaattcatctttacggaaatcttcatattcacggaattccgctccgcttgacgcgattttgttctcatattccttcacgccgtaatatacgacatgttccccttttgccttcagttcttttacgacgcctaaagacggattgatatggccttctcccggaaagccgatcatcaatacatttgccatctttccactccctattcttttaaattttatgtatatttaaacgataacatcaatacagaaaaaggtaaagatgttcaccttattaatattaaatgggtacaatattcccattttcttattatttcgtatgaagcgcccgcggcgaaacaagcggatacagtccgccgtctttagcaaaggacatttttcccgtttcttctgaaacaacgagcacgagtgcatcagtcacggccgaaagtcccatcgcggccctgtggcgcgtcccgtatttgagatcgacatgttttgttgtgagcgggagcacattggctgctgatacaacccggttttctctgaccaatacggctccgtcatgaagcggattgccgggataaaaaatactctcaattaaagctgcactgatctcggcatgcaggctggtccctttttgtatcattccgtccagcggatctgcacgttcaatcacaatcagcgctccgtgtttttcttccgccagatgctgcacggccctcgccagctctgtataggaaggcgtaaagtgttcgatatatgactgcaggtaaaacgacgaagcgacagcctgcatttcctgaaacgtatgtcccagttcatctaattcgcaaagaaggcattggtctttttcattcaatgtccgcagtatcattccggcatcctccgtaatttgtttcaaatacgtttgaacggcagcggtaaacgcgctttccgtcatttgagtgtggcgcatgtcacatcagctcctttcccttattttctgcatcgtgcgcatggatatgcgccgctgtgtgcaccataatcatgaaaggaggcgcacatcatatggaattcgcacggctgatgcaatatatctgcacctttttaggggtcatttcactttcattcatttatgccaagatgtttaaaaagccgaaaccggacaaaaaagagtaggccggctttcattgctttttatacataaaatgttataatttctctcgttaaaataaagaaacggggaacctaacttgagagaaacgaacacgatcggccaaaaggtcagacagctgttacatatcttcattccgattttaatcacacaggcgggcctttccctgatcacctttttggatacggtgatgtcagggaaagtgagcgctgccgatttagccggggttgcaatcggttcaagcctgtggacgccggtttatacgggcctggcaggaatattaatggccgttacgcccgttgtttcgcagctgtttggagccggcagacaaaaggaagtgccgttttccgtcatccaggccgtttatgtagcggccgttctcagtgcggcggttatcctgatcggctttttcaccgttgatatgatcttgggacatttgggcctggaacctcgtgtccggacgatcgccaaacactttttaggatttttatccctcggtatttttcctttgtttgtgtacaccgttttgcgctcgtttattgatgcactcggcaaaacgcgagtcactatgcttattacgctttgctcattgcctattaattttgctttaaattatgtatttattttcgggaaattcaacatgccggcattgggaggagtcggggcggggctcgcttccgccctgacttactggtgtatttgcgccatcagcttttttatcgtctgcagatttgagccgtttgccgggtactctgtatttcggaaactgtaccgtttttctccgactgaatgcaggaagcttttgaaaatcggattgcctatcggttttgcggtattttttgaaacgagcatttttgcggctgtcacactgcttatgagccattttcagacggtgacgattgcagcccaccaagcggcaatgaattttgcttccctcttgtatatgctgccgctcagcgtatccatggccatgaccattttggtcggctttgaagcaggcgcaaagcgctacagggatgcccgctcatacagctatatcgggatcgtgatggcgcttagtttttctttatgcacggcggctttcattttgctgttcagaccgcaaatcgccggaatgtatacatcagatccggcggtgctcatgttgacgcagcactttttaatctatgcgctgtttttccagctttctgatgccgtagcagctccgatacaaggcgctctgagaggatataaggatgtcaactatacactcggcgcggcttttgtgtcgtattggattatcgggcttccgctcggttacgcagtcggcacttatacgggcctcggggcatacggctactggatcggtttaattgcgggacttgccgcaggagctgtcggtttatttttcagactgatgaagctgcaaaagcgttatgtgaaaaaaatgacgattttataaaggaggagcagcaatgccaaaacataaactgctgtacgattatttaactgaacgggcggaggacatcagtcagacatggtttgatacgcttcatgaaacggatcctgattctgtttatgcttctactgacccggctgtactcacaaatctgaaaaaacaaaatctggcgtttaattatcaactcaatcggattttttctgaagagaaggaagtatatacagcggcattggaaaagtgggcgtttgaagccgcacgggatgaagaacatttaaaaactcccatccattacatcattcgcgagtttatcagagttcgtgatttgtatgtcggccatgtcaagcagtttaccagacttcattcagacaccttgacagaagaagatgccgaagatatattccatacgctgattaaatcgtttgatgtggtgattcatattttcatagaagaaatgtataaaaacacaaacattcagcttaaagcgcaaaaagaattgattaccgagctgagctcgccggtaattgtgctttttgacaatgtcggactgctgccgctgatcggggatattgacacggcaagagccaaaatgatcttggagaatacgctgcaccagtgttcagagaagcgcatcacgcagctgtacattgatttatcgggcgtagccatgattgacacgatggttgcccaacagcttttcaccttaattgaatcactcggaatgctcggcgtgaaagcgacattatccggaatccgtcctgaaatcgcccaaaccgcggtgcagctgggactgagtttttcaaatttatcaatacggtcttcgcttgcagaagcgatcgcttccgatctgacacaaaaaaagggataaggcatttcagccttatccctttttttatcagtctttccacggatatgtccaatacacttcttcttcaaaccatgtctgaagaaccggctcgttattttttattttttcttccagctctctcagcatgccttccgtttgggtacggtgcgcttttaatgcattcattttaatatcggcaacctctttaatatcaagaataacatcaggcttgccgacggcttcctccctgttgcgggtgattgccatgcaaagcgtgcgcgggcggtcctcttttttctttctgtaaagcgctctgataaccgcttcgccgcatgcatcatgatccggatggacgccgtgctccggatagaatgtgacaatcagactcggttttacatcgtcgataatctcttccatcatatccgcgagccactcgtcatcttcaaattcaagtgttttatcacgaagcccgagcattctcaggtcagtaacgtccattgctttgcatgcgtcgatcagctcttgttttcttaacagcggcagtgtttcacggttcgcgaaaaaaggatctcccatgttccggcccatttcgccaagcgttgcgcatgcatacgtaacgggaatatctttttgtctgtgtaaagcaatcagccctgccactccgtatgattcatcatcagggtgaggcaggatgacgagtacatgttctttcatgattttcacccttttctttaaactgtaaacggcttttcgctgatttgaagcgaaatcgccaattttccgcccggcagatgccctgccattaacaagcggtcttcgtcatctactgtatactcagttaaaccttctgcgtaaatccagccttcttccgttttcaaaccgacgcggtacgggccgtttcctttgattttcgcctgatggtacgtcacttttgcattgcgtatataggctacaaccgtcatgtttttctcattcagatgcgctgaataagaaccggtcgttgtttccaaatggatatatacaggacgatcggcatatcgctctaaagaagtttgcacatcttcttttatgatcgctttcatagctgctcccctctttcttcttttaaaaattgcaaacgcttcgtatgtagttcaaccaattcatatttctcaatcggccgcagccgggaatctacaattcgctgcaccgccagagcaaacttttcctcgggtgacttccggagcctcggatgtgttctttgatcaagcagttcaagatcaattgccttctccgcttcttcaagagttgaagccgggagagtgcggttattccacagtgcctgataggcttttgctatgtctttatcagtgcccattgtacagctcctttacatactcgtaatgattatacataatttaagctatcgctggaaagcgaaaggcttagcggctttttatcggccgcttccattttatctgtgaaaaggtaaacaaaagcaatgctgcccatatacaaatgaaggtaaacgctttttgcccggaaaacggttcatgatacacaaatacgccgagcataagggtaatggtcggcgctatatattgcaaaatgccgacttgatacagcggaagacgctttgccccctctgcaaacagcaacagcggcagagccgtaaatacgcctgcgaagaataggagcgcccatgttcccgcccccaaggacccggaagtgctcccgtcagctgtatatcctaaataaataagtgcagccggggtaatcaaaagcgtctccagcgtcagtccgatcgtgctggacatgcgggttctttttttacataagccgtacaggccgaagctgaatgcaagcagcaatgcgatataaggaaccgcgccatattgaaacgcagatatgatcacggccgccccggcaatagaaacggctgctgtttgcatcttgttaagcttttcttttaagaataggatgcccaaaagaacggaaacgagcggattaatgtagtacccgagacttgcttcaagcaaaaagccgtgattgacggcccatatgtacacaaaccaattaacggaaattaaaacggaagcgaaaaaaagcgccagcaggcccccttccgatttcaaaagacgcagttcacgccatccggttttccacttcttaagcacagttaaaagcacacacatgaaaacaaatgaccataaaatccggtgagctaaaatgtccaatgcgggtatttgttcaagaagtttccaatagaccggaaacagcccccacatgacgaaagaacaagcggtataaatgattccttttcttgcgttattcccttgcacggccttccccttcctttctgtaaacagattatattatatcacgggaagcttccggcgggcatatactatgttgtccgttaagaaagggtgagatgccgtgtttgattggaacagatattttcccttccaaaatcagttctctaaagaaacgtttaaaaatgctgatccgaaagatgtcgagacatatgtcaaccgagtgatggaaagcgtattcggcgccggttatgccggacagttcccttttcgcgacccaatgtccaaaaaggccgagccggtcgaagcggaaccgcccaagccggaaattgacctttttgaaacatccgatcatgtttttgcgaaaattcccgccgaacaagaggaactcgaccgtatcaggattaagcatacgtcacacagcctcgttgtagagaacagcagtctgggagaaggaaaaaaagaaatcgtccttccgagcctcgtcaaacggaaaggaacaaaagcagtctataaagacgggatgattgaagttatgttttcaaaacaggaagactacaatctatcggaagtggagattttaagataaaaaaacggcccgcgcgatgcaggccgttttttctttaataaaatggcggataaccgccggcacccggcccaaaaccgccgtatgggacgcctccgtatccgtaaccggcgaacccgtacggatagcggggtcttgtgaaacctgtggcaatcacgcctccgagaagaccgcctaaaaatccgccgaataaaggagcgccgaacaaaaaaggacttctcgccggaaatccggcaggaccgaaattcccgcgatacaatgcatgacgagggtacatgtttttcctcctttatgtctgcctattcttaagcgtattcataaaatgaggaaattgattgggcgattgtaacaacatgtgcctctctctgatattgcattaatgcataaacattttggttataatttgattacattttgattaaatgttatacttttttacaagtttcgacattataaaaccatcagggggaataaaatatgccattacttcgttttgacgttattgaaggccgggatgacgcagcattaaaaaaattactggataccgcccattacgccatggttaaagcttttgacgtccctgtaacggaccgttatcagatcgttcaccagcatcggcctcatgagcttatcattgaagataccgggctcggtttcaaaagaagcaaagatcttgtcatcatcagcattgtcagcaaagcgcgcaccgaacatcaaaaagaaacgttatatcaactgatggctgatcagcttaaaacagaatgcggcatatcacccgaggacgtcatgatttccattacagaaaacgggaatgccgattggagcttcgggcttggtgaggctcagtttttaaccgggaaactgtaaaaggcctccccgcttgttctgaatgattgcaaactgaataaaagagggatgtatgttggttagtgagttgtatccttgtttaatatgcggatttaaaggattagagacaagtcccgtttataacggcgaatatcaaaaaacatttgatatttgcccctgctgcgggtttgaattcggctacagcgaggaccatgacgtaagcttagggtttattgtaacgcctgatcatttaattgaagcggcatttcagttataccggaaacagtggattgaaggaggaatgaaactattttctccaaatgatgtcccggcggaatataaaaatgatcatttccttacattcgatgctttattaaagcaattaaaaggcttgaacctcaatctgaacaattttgatattaatggtttttatgacgagtaaacatgatcattaagaaaaggctgccttgggcagcctttgttattcatcacatgtgtcgttggcagatcccccgggctcgcaaaaactgtctgcccatttttgcatttcctgaaaaacggcttgcagggccaagcctttatcagtcagtttataaatgactttgacaggtgtttcaggcagcacctgacgctcgacgatttcattttgttccagctctttgagccgctccgcgagcattttttggctgattgtcggtatcgtttcggtcatatctttaaatcgtttcggcccgtccatcagtacatggataatgaggccgttccagcgctttcccaaaagagaaaaagcggattccattttaggacacattgtatatcccacgtgagttcatcccttcatctatgaattgacaagttttttgtgatccattaaaattagttttcgagttacatttagtaagcttctaacttttctattatgataacacgtttatccgaaggaggaaacatgatgacatccgtattagacgttttaaaagaacgcgcatctgttaaagaatacgataaagacgcggtcattacaaaagaggaattaacagaactccttgaaatcacaacgcaagcgccttccgcctggaaccttcagcattggcattttcaagtctttcacagtgatgaagcaaaagctgccctgcttccggttgcttttaatcaaaaacagattattgattcatcagcagttattgccgtattaggcgatttaaaagcaaatgaaaatggtgaagacgtttatgctgaactggctgagcaaggcaatatcacagaagagattaaacaaacgcttttaggccagattaacggtgcataccaaaatgatcagtttgcccgtgattcagcatttttaaacgcttctttagcagcgatgcagctgatgctagccgctaaagcaaaaggctacgacacttgcgcgatcggcggattcaataaagagcaattcgttaaggaattcgacgtgagcgagcgtttcgtgcccgtcatgctgatttcaatcggtaaagccgttaagccggcgcataaaagcaaccggctgcctgtatctaaagtgtcaacttggctgtaagatgaaagaaacccttagtccgcttaagcagactaagggttttttataggaatcgctcactgtaccaggttcgtgcctgctctgcttcctgctgtgtgagctgatgaccgccctcctgccaaacaagagaaacggatgcatgggcatctgtcagatactgataaagctcctccgattcttcttttgtacatagaggatcgcgttttcctgcaccgataaacacaggcagcccttccatatcaggcagcttcactccgcgtatcggcaccatcggatgatgcagaaccgctcctttcagtacatctttataatgaaacaaaagacttgctgcaatattggcgccgtttgaatagccggcagcaatcacgttttctctgctgaatccgtacatttgcgccgcttcatcaataaaattctttaattcttccgtccgttcaattaaatctttctcgtcaaatacgccttctttcagccgcttaaaaaaacggggcatgccgttttccgacactgatcctctgaccccgagcagacttgcgttcggatcgataaaacgtccgagcgacagaagatcatgttcatttcctcccgttccgtgcaaaagcagcagaacattttctgacgttccctgttcaaacacatgtttcatcatcattctcctttctccattttgggcagaacagctgtaatctggctgcgatgctcttccagccattccggaagcttcagctctgttccgagattttcaaaggattcatccgtcataaagcccggttcatcggttgccatttcaaataaaatgccgccgctttccctgaaatagattgatgtaaagtaagacctgtcaagaatgtcagatgaagcaagatgagaatcagcaagaatatccttccatttcgcctgctctttttcgctagtgcggaaagcgacatgatgaactgtcccgtaaccgccgatacctgtttctttcggcgcaaggtcaacatctataatatgtccgatccgcgcctccaattgcagcctgacaatctgctgttcttctcctgtctttgaataaccgaagcgttctatgagaaattgaatggttgcttcaggacggtacgagtacagaagaacacctctcatgcctgtgatcgcttctttttcagtaatgcccgcaggagtccattcactctgtccgcttctttcatcttccattatggcaagcggcaggtcttctgtatcattaaagagaagcacttgttcagacagcatgatctgttcttttacagacaagccgttgtcttcaagccggcgcttccaaaacgcgagtgctcctttcggcacggagaaataaattcttccggcctgcccttttcccacggttcccgggcggcttccctgaaaaggaaaaaatgtaatgatcgtgcccggctctcctttttggttgccgaaataaaagtgataagtggccgggtcgtcaaaattaacggtttttttaacgagccgcaaacccagcacttcagtataaaaccgaagattttcagcaggatcttttgcaaatgcggtaacatggtgcaatccttgtgtattcaatgtattcactcctaaatatcttgatttcgagatattaactattctaatttaatatgaatgaagatgcaactaaagtgtttcagttaaaaaagtaatagaattcttttttttctgaaaaatatcttgtgatcttatctgacacctgctatgataaggagcattatcaagtttcaggaggaaagtaaatggtcagaaaagcactaattttcgttctcatcttaatccctttcagccagctggccctgctgtcagtcgctaatcgggttcatccgatcattatcgggctgcctttttttcatttctggctgcttttctggatcgcagtcactccattatgttcgtttcttatttataggctgcagaagaaacaaggaggactggactgatgcccgcaaatataacagcattgatcattacagccgtcatcgttttaaccgttgtctgtatcggctttatagccgggagagacaaatcatcacgcacttctgttgaggaatggtctgtcggcggcagacggttcggggggctcctcgtctggtttttagtcggcgcggatctttatacagcttatacgtttttaggcttaacaagcacagcctacacagggggaagcgttgctttttttgcaatcccgtattctgttttggcgtattttatcgcgtatttctttttgccgaagttgtggaaagtggcaaaaatacacaaattaacgacgcttgccgattatgcccgtgagcgttttgacagtaaacttttggccagtcttgtcgccattatcggcgttcttatgctcattccttatatttgtctccagctgagcggaattcaagatacgcttcaggtggccggaacgggtgtcattaatgtcaatatggtcgtcatcatctcttttattcttgtagcgctgtatacttttttcagcggaattaaagggccgacgtttacggcgattattaaagacattctcgtgtgggtgattatgctgtttatggtcgtgtcactcccgctgatccattttcacggctggacgccgatgattcacactttggctgaaaaagcgccgcaaatgctgacgattccggactcggggccgaaaggaattccttggtttatcacagcttccatcgtatctgcgctggcgctctttatgtgggcgcatgcggcaaccggcgtatttacggcaaaaagcgcagatgccgtccgcaaaaacagcatgtttctgccgctttataatattgttttgattcttgttatttttctcggctttatcgcgtttcttgtcctgccggaagataccaatccgcggcttgctttattgaagctgattcaaacgtcttacggcggagtcgcgcagggctttgcttactccacgattgcccttgcgtcattgattccctgctctatcatggccatcggagcatcaaacttatttgcgaataacttatatcgggatttgattcacccgaatgtgtcaccaagcaagctgacgatgatcacccgttcaatggtatttgtcgtcatcggactcgcgcttttattcggcatgctgttcccgactgcgctcgttacccttcagcttctcggtgtttccggcatggttcagatctttccggctatcgccgtcagtctgttttggaagaatcaaacgaaagaagcgacaattatcggtcttctcgtcggtcttatcgtgacattcacggtaaatatcacccaatccgcccacggtatatatgaaggcttttggggtttgaccgctaacatggcagccgttattatcctcaacccgttttttgtaaaaaaagcggcttcaaacgccgtcaaagacggtttattcaataaagcgccttctgatcaactgaaccaaaaaggcgcttaacagaaagaagccggcacgtaaatgtgccggttttttacttttttcacttccatttgtaggtagccacagttttagccgggatgacggcttcaaactgccgattttctgaaacgacatggaatttttgatcggcggatgtctggttgattacgactgtcacaatggattgatcaggattaaggaacgatacattcgagactgtgtttttggagccgtaattactttctatccgctttgctccccggtcgataaattttgaaaagttgcctgtcatatgaaagatcgggatattccaatagcggtcagggtttttggcatcctgaataaacagcgtcgggtccggggtgcctatccaatgatgcgtcttgatttgactgtcgagcatcgtcacccacgcattgtagctcgacgcgccgttgcggaaatactgcgcgatccggtccgcccctgccgtcccccagacagaccgctccgttaagtgaatagattgatcaggatatctctttccgatttccgacatgacggaaaggtcaccgtcataatcgtgaaaagcgatgccgtctgccgcccggtttccttttttatcttctaaaatcggcggaatatagttccacgccccgctcgcattgtgatcataaatccaaattttcgtgtcaattacgtgttgtttcatttctttttttaaggccagtgccagtttgcgctgctgagacggcggcatatacatgctcggatagtcgatttccagcaaaggttcattttgaagggtcatggcataaatcggaattccttgcttttcgtacgcctcaataaatttgcggaagtaaacggccagttcgccgatatatttatctttcagctttccccgcttgaggttttcattcgttttcatccaagccggcgggctccacggcgaggcaatgattttcagttccggatttatcgccagggcttccttgatggttgctgtaatgtgtaaatcaatatccttttggatcgagaaatgacggagcttaggatctgtttggccttcaggcatatcgtcatacgtataaaattcctgtgccgtaaaatcagatgtcccgatcgttatgcgcataacgtccatgccgataccctctttgggatcaaccagttttttcagcacttcctttctttttgcgggtgtcatttttgacaaattatggattgtgaattcttccagggacgatcctacgcctaacacactttgatagcggcgcgacggatcaatatacacagcggcggagtcagaagccttcttttttgtcaatgtaagcggtgtttgttcgtctaaggcgtatttcacttctagcggcccgtcataccacgtacgggaagccggatctttttcagaactgaaccacacccttactttgtttttgtctgaagccttccgatcagccgcatacacttcggtttccatgctgcttgatatgaaaaagaaaaacataagaaaaaccagcgtcatgtgcagaccttttttaaaaaacatgaaccaccatccctttccttatttttataagcgattctaaatgaaaagccggacagtcacctccttcccgcttaaatgaatgcgctttcaaaattactgataaaaagccggcttcacacgacggtgaagccttccctttttacacctttaggatacatatgaaccgtttgtttcaatcacttttttataccattcaaatgagtctttcttaagccgcctcattgaaccgttgccttcattatcccgatcaacataaatcatgccgtagcgttttttcatttctccggttgtaaatgacacgatatcaataattccccatggtgtatagcccattacatccacaccatcatatgtgattgcttttttcaaagcttttatatgtgacgataaatattcaattcttgctgtgtcatgaattgaaccgtcctcttctaatgtgtcgatggcaccgaatccgttttccacgataaataatggaatctgatagcggtcgtataagcggtttaatgtgtaccgtaaaccggtcgggtcaatcgcccagccccaatcactcgctgtaatataaggattgtccacgccgtttggcaatcctccgtttacgacatccccggtattatcgtttgatacatcactttttacggttgtagacatgtaatagctgaatccgaggtagtccactcggccgtttttcaaaatctcttcatcaccgtcttcaaagtgtatctgatagccttctctttcaaattcttttaacgcatagcttggataatatccgcgaacctgcacgtccgggaagaaaaaacgctgtctcatcgtttcttcagccagcatcacatcatcgggatgagatgagtacgggtaaatcggaacatgtgataccatggcgccgatcctgaactcgggattgattttccttcccttcgaaacagccaatgcgcttgccagcagttcgtgatggccggcctgatacatgacttcttttgcgttttcgttttctttgacggcgacgcccgagttcgtccataaaaagatcggattattcacatccatcttattattgatttcgttaaacgtcatccaatacttcaccttatgtttatagcgttcaaaacacacttcagcgaatttcacaaaaaatccgactgtttttctgtttctgaaaccgccgtattccctcgccaaatggagcggcatctcaaaatgtgacaacgtgattaccggttcaatcccatgtttcagcaattcatcaaacacccggtcgtaaaaagccaatccttcctcattgggctcggcttcatcacctttaggaaaaattctgctccagccgatggacgttcttaaacatttcagacccagctcgctgaataatgcgatgtcttctttataacgatgataaaaatcgatcgcttcatgattcggataaaattcccgctcttcaattgtatctgttattttccggggcacaccatgcgcgcctgccgtcatgacgtccactacactcggccccttgccgcctttattccatcccccttcaaattggtgggcggccagagcgcctccccataaaaaatcttttggcaatgtccccatcgtttatatcctcctttatttgactgccgcttgcatgccgaataaatgcactgcagccgcttcaagcattcgcttcgcaagtgcagaagaattcctgcctttattttcatattatacgtttacattataattgtaccggtataatttatcaatacataaacaattatagttaatttacgaaatggcttttaaaaacgattatgctataattctggaagaagcgggacaataaatgaatgaggaatgtatatgttaaaataccagcaaatcgcgatagatattgaaaaatacatagaagaacatcagctgcagcaaggggataaactgcctgtgctgcaaaccttaatgacccggtttaacgtgagcaaaagcacgatcaccaagtccttagatttattagaaaaaaaggggattgtgtttcaagtgaggggaagcggcatttttgtcagacggaataaaagaaaagggtatatcagtctgctttctaatcagggatttaaagaatcgctggaagattttaatgtcacttccaaattattagcgctggaagtgagaaaacccacgcctgaggctgcccaaaatctgaatatgccgcctgacggcgacgtgtattatgtcaagcgaatccgatatattgacgggctgacattgtgtatcgaagagtcattttacaacaaatcgattattacgtatttgaataaagagatcgtggcagaatcaatatttgattatattagagaaggtctcgggttaaagcgcggtttttcagatttatatctgtacgcggggatgttaaatgaggaagaagcggagtacttaggtctgtttacaggagcgcctaagctttgcgttgaaacgatttttcatttaaccaacggccagccgtttgacttctcaaaagtcacctatcactatgagcaatcacagtttttcattcaggcgaacagccacctttttgaacaggaaacgacataagacgggcttttcgcaaacagaaaacacccaatgcgcgtgcgacgcatcgggtgttttttactatttcatattcttatttaatgtttcaacggcttttttcatttgtgtatcgttgtccgcaagctgtttttgcagatccgtcatcaattttgccgttgtgtctccctttataatgcctgtttgtttcagtttctcttttgcttggaattgtttaacggcttgttcaaatgctttatcatacgtgccgtttactttcacgctgtaccccagcgctttcagcattttttgcgcattggtgacggtggttccggaatccccgtatttgtatgtttttttcgcatctaaatacggcaggttcgcatattcaggaagcttaacctgatattgcggtttgatgccttttttatgaatccactctccgtccgctgtgagccatttagcgattgtcaatttaacggtagaaccgtcgctgtaatcttttgccgtctgcacggttccttttccgaacgttttctcgccgatcagcggaatgcccgatgattcatgcagcgcagccgacatgatttccgcggcgctcgcggtgccgtcattgacgaggacgactgtcggttttgtcactttgcgctctttcgtcgctttcatgacctctttcgtgccgtctttgtattcgacctgcatgatatttttccctttatcgataaacatgttgctcattttgatggcttcatccatcagtccgcccgggttgccccttaaatcgagaatgtatcctttcgctccttgtttttcgaggctgtcaatggctgaattcagctcttttgccgtcgattcggagaaggatgtgatttggatttcgccgatgtctccttttttcatttcagagtacaccgtttcaaccggaatggtgtcacgtttgatcgacaggttcagatcgccgacacccgctctgtgcagcacgagcttgacgtttgttccctttttgccgcggattaatgcgacggcttcgtttacattaaggcctttaacgcttttgccgttgaccttcaagatctggtcattcggtttaacccccgctttttccgcgggtgaccctttaatcggcgatacgatcaggatgctgccgtccttttcttccacttgtgcgccgatgccttcaaacgaagcggaaatggtttcttcaaaagactttccttcctgcgggtccatataagaagaatatggatcatccagggaactgatcatgccttttatcgctccgtctactaatttgctgtcatctgttttttgatagtaatcacttttaatctgctcgtaggctttattgaatttctcaaatttgctgttcgtcaaagcagccgagccttgtccgaaaatggtcgtattgcccgtgataaacagcgtaagcgccgaggctgcgaccgcggtgatcaatataataaaaaacagtttaaattgccgcttcaagaaaacaccacctttttattcttacattattatcatagacgaacgctcattcgtcaacttcaaacgtgaggcgcccttctttcccgtttacccaaacctatgcttttctctcaacatatgctgaggaaaaaaggaggattcggcctttgagcaaatatttagaaatgctgtccttattcggagtcggaggggctcaccccggcgggctcgctttttccaaagccgttctcacaaaagcggctcctcctcctggcgaaccgattcttgacgccggctgcggaacgggacagacggccgcttatctcggccacctgctgtatcccgtcacctgtgttgataaggacccccttatgcttgaaaaagcagcaaaacgatttgccgctgaaggcttaaccattccgggctatttggcggagcttgagcggcttccgtttgctgaaaatcaattttccactgttctttccgaatcagttctcaccttttcaaatcttgattcatcgctgtctgaaatcctgcgggtccttaaacccgggggtatgctgattggcattgaagctgctttacaaaagcccatgccggaaaacgccatcacgcagataaaagacttctacggttttaccgtattgcaggatgaaacggcatggaaacagagattgcttcagcaaggctttcagaaagcggatttcattcccgctgtctatgaaaacaatgcgcaggagccgactacagaaatggatttatcgcccgttattcagccggttcactacgatacgctgacggctcattacgagcttatgcagacgtaccgtgaatatatgggacactgcgcttttgtcgcttacaagtaaaacggcaattgtcctcctgttttcgtccaacctttttaccgaactctatcataagctgacatagaaagataggttggataggaggagaaaagatgcaaaactattatcatctttgccggcagcaccagggaaaagtagcaagaattacagaacgaaacggcagagtccacgtcggaagaatcgtacgggtgactaacagcaaagtgtatatcgcccctgtcggcggccgtcacagaggatacgggttcggctattggggaggctggggaggctggggagcagcctacggtatcggccttggtttaattaccggatttgcgcttggaggtttactcttctggtaataaagaaagcccgctttctatttttcaagcgggcttcttcttattacactttctttacttcattaaaatattcttcaagcgttaattgatggtcatggatggcttttgccgcttttttgcctacatagcgtaaatgccatggttcatactcatactttgtgacattttctttgcctttaggatagcggatgataaagccgtattcatacgcatggtctttcacccatttgccgtccgccgtgtttccgaacgcttcattcagctcatacccgttgcttttgctggaaatgtccatggcaagccccgtctggtgttcgctttggcctggatatgcgacggcttctttcgcctttttttcacctttcagactgacttcattatcgaaaataactttctgtctgtcataagagcggtatcctgaaacggcaaccaggtcataaccttcttttttcccggcgctgaatagttccgccaaagcatcggcggcaggtttgcggatatatcgtttctcgattttctcagtaaaagaaaattcgactttcgggatcacgagatcattcggtttataatctcccggcagcgtgtatgtcttattcacgagcgtaagtgtatttgtcgggttttgaatggtctcaagcccgttcacttctttaatatcattaaaatatttgctctccaatacaaaatcgctgttttctgccttcgttgtttttttgcttgatgtgtcatctgattgttttgtttcagctgctgtttttgtgtccttgtggctgtcgccgcctgaaatgctgcagccggttcccacgattgcggttacgctgagagcggcagcgagcgagaaccatttagtggatttcttcattttacacttacctttctttttttgaatcagggcgatgcataaagaagagggctgctttaatcagcaggaccctcatctcaagtttacgaaacagtatgcagcgccagtttaatcatatcatgaaaagtcgtttgacgctcttctgccgttgtttcttctcccgttaatacgtgatcgcttacagtcaggatagacagcgcttttttgccgtatttagcggcaagcgtatataaagcagtcgtttccatctctacgccgaggacgccgtatctggcaagcttttcgatttgggagtcttcattgtaaaactgatcggcggtgaatacgcttccgaccgctacgggaagattgtttttttgcgcttcctggtacgctttatgaagcagttcgaagtctgcgcaaggagcataatctacactgccgaaggcgacacggttcatctgtgaatccgttgaagacgtcatagccaaaatcacgtcacgcaccttcacgtcattacggatggctccgcatgagccgactctgattaagttttgaacatcatagctttgaatcagttcattcacataaatagagatagacggaacacccatgccggtgccttggactgatacttttttgccgttatatgtacccgtaaatccgtacattcctctgacttcattatagcattccacattttcaagataagtttccgcaataaatttcgctcggagcggatctcccggcaaaagcactgtatccgcaatttggcctttttctgcgtttatatgtacactcatttccttttcctcctgcctattcaaactcccacccattgtacactgaataacggtaagagacaatcatcagcatgatcagggcgatcttgggcagaatatgcgggatgacaagcctaaagaaaaaggagtgaacataatgggcaaaaaacagcgcaaccgggtgaccggccagaaaaagaacaatcacgtgcccgtttcagacgtcattgcagctgatgaagcgcatggaaaagagcattccgccgctaaacggaagccttaacactgtctttcccagacaatacggaagccggctgaagattcagccggccccgtcttacctcggctggacgagcagccggttaattttgctccatcccgcagggttaagcctgtaataggtctttccttttcttccttcgtctatgagtatgacatctccggtcgctatgaatctggcttgatagtcgtttgggaccgtatcaggcacattaaaaacagaaaatgccctttccagtgcgtcttgatgattgtcagcggccagctctgtccgatagacgaccctgtatccctttttctcgccgtagcggggtgtttgaaaaatcgtcacatcataggcgcaagtcttttttttaaacacgggcagcgataacagcatcaagatccctccctcttatttcttaatagtattagcgttttttctcatttctcctgtctctatttttgtcgaaacggatgatacttttcgtcaaagagcgcaaaaagcgaaacgaggcaaagtccgagactgaatccggcaagcacatccgtcggaaaatgcgcgcctaaataaattctgctgaatccgatcagaatgacgagaaccccggtaaagacggtgacggcccgttttcttttcgtaaaaaacggaacatgcttgatcaaaaagtaagcgatgacgggatacatcactgccgaattcatggagtggccgctcggaaaactgtatgaggtttcatggacgagcggttcaaaagcgggtctggctctttcaatcaattcttttatttttatgtttacaatccgttcaatgagaaagagaagcggcaaaaaaacaacatccggcgtttttttgtacatatacagagccgcgcctgtcaaaagaagaagcggcaaaagcactgcggtcgtgccgagctccgttatccataacatcaattcattcagccaggcagccctgatcctgacagccgcttctatgacacgctcatcaaaaatccggacggcttctatccggatcgctgctgcgagcagaataaacaatgcgaaaagacttgctggcttgtacaacgttttccccccatgtttcattctcccgagctgattgaaaaaaccgaagctttttcacttcggttccgcagtttcagtcttcatcaagctcttcgtctatcatacatttttctaataaataatcaaaggtgatgtcggctatttcgaagatttcctcttcactcggtatgtacccgcgcatagcaagctgactgtaaaaataatcagctatttcttctgtgtcaatcacaagatctatttctttcatgcaaacaccgcctccttttttatgttttatgaaaaaaccgttcaaattatacccgaaagttctaaacgttttgtccgctcatatacttttaaaaaacaagccccagagggagaaaagatgatgacgaaaatgatggctttattggacggagatggatttgatatcgtattgaaaaaagtgctgaaaggaatgtcgtttgtcatctttgccggctgtctgccctggtttttatatgtcaccgtccgtttttttgccggctagctgaaatgctcccgcaggctttccagcacaaaattcatcatatctttatattcttcgtcaccgaacaaatgataaagaatcttataatcgttataaatatcaagcagctcatctacaatcgataccgccagcacatgcagggcatcgggatcatcagcatcgccttcaaactgaagaagagcagacgcgacggtatcctcgccgatctcatgagatgcttccccaacatagtggacaaacagcagctgatgcacaaactgatccatttcatattttctcagaaccagcgtgagatcctcttcctccgtttcaagccactctccgtctttcagccgagtcagctcataaataatatcctcccagccatcctctaaatatctccatatttcagttctgtggccgatgacacggaataattcctttccgtagtcctttacatatactacgtcgccgatcagaaattcatattcaatatccaatttttccatatcgacgatcacgccctcataatctttataaagctggatggacgattcaaaataaagcacttcattatgattgacttcgtaaagataatgtttatcaatttgatgaaccttcgtaatggtgccgacggttccgtacatcacgacgaccacgatgtctcccacttgaaatttcggtttatctggcttcatgctgtctcccccttgccgcggactgtcatacgctatcgtatgccggccgccatcatttcgcatgggcatgaaaaccacaggaaatatctatttctgcacctgttcaaaatggcaaaaaccgcaacatgcttgtgcgttttttcacttaccgtaacagaagcgcctgatgacattccgctctcgatcgactgagcagtaacagtgctgagacaaaaagcgcctattttgaatgagtttttgttttttctctacgacgcaaaggtaaatacccggcccgaaggcatgttgacaatatcaccgccgtgatgttcaagatttgccgcgaaacacatcatcgaaggtgtagggagatccaattccggctgcatatttgcaatggcttgtttatcataaacaaccaaactcgtttcggctttcaatgaaggcacaacttcaatccgcttcaaccttgtcacataaaatcccctattccgtccaaacgtcagtgcctcatcagtcttacctaatggatcatttgattcccctcacttcatttaaatgtttgattatttctccgtgaaaagcgattccttacccgggaccccgccggcagcaggcctgatccggtgaactctgcagctatacattctcctgccttatgatacgtgccgtcaggaagatgtgtttacgtgctgatcaaaacggacggcgttgcgggatttgatcatacggcacctcataagcgagtgatttcaacagaaaaaaaccgcacaatgtgcggtttttcgtcaggcgtgatgcacctcggtctcatatttttcccaagcttcatcaaatgtcgccatcgtttctaaatagtcggcgctcagttctaaataagaactgagctcgtgataatcgcttgacgttttcggaaagccgtgatcttcgtatgcctgattcgcaaactggctgattgcgtcctgcggcttgggatgcctgtatttcatcaaatagtgataaaaggatttcatgggtttcccctcctgatgactgtcttttgttgtactattatacaattcaagtgtgaaattacaacaaaagaagactaggagaagtcaaaataattccgtttcaagatccgttctgtccccatcagctcttgatatgtgagtgtttccggtaatttttttgcattgactaaaaaaagctgattttcgatttccgctatgaccgcttcctcctgataagtcatgccgcaggagggacaggcgaatgcgggtgtttctgtaatttctatggccctcgtaccgtcaggaagctcccagtacacagccgcctgacaagctgacgccttctgattgccgcaccactcgcatggcttcacggcgactcacctccgacttccgatcctgctttttgctctttcttttgctgtgcaataaatttcttttctttcaattcatctcttttttccctgcggtctttcagcgtttcatgatcagggttggatgtaaacgttttccttctatcgatcctcgatacattttccggtgtgaacgaaacctctttgtccgcgaaaatggcgctcagtccgaccggctcgcgtttggccatcgttcccggaaaaacagattcaaaatagtcgtcggcttgattcgggatatagttttccggctcgggataagatgtaatcaccccttcgaagtttctgatcacaactttctccggactttgggagagcaagtagttcggctgcagggcgattttaccgcctccgcccggggcgtcgacgacaaaggtcggcacggcaaagcccgttgtgtggcctctcagtccttcaatgatttccagccctttcgacacaggcgctctgaaatggccgatcccctctgacaaatcacattgataaatataatacggacgcacgcggattttcactaaatcatgcatgagttttttcataatcggcaccgaatcgttaatgcctgctaaaataacggcctggttaccgaccggaacacctgcgttaacgagcttttcacacgccgcaaccgattcttccgtcagttcgatgctcgtattaaaatgagtgttcagccagaccggatgatactttttcaaaatctgacaaaggttatctgttatccgctgcggaaatacgacgggtgctctcgttccgatccggataatttcaaggtggggaatgtcacgcaggttttttaaaatatattccagaatctgatcgttgattaaaagcccgtctccgccggaaatcaggcagtcacggatttccggagtttcccgaatgtaagcgatggccgcatcaagctgttttttcggcacccccattccgatctgtccggaaaaacgccttcttgtgcaatatcggcaatacatggagcattgatttgtcaccagaaaaagaacgcggtcgggatagcggtgcgtaagaccgggaaccggtgaatcttcatcttcaaacagcggatcttcaaggtcatatttcgttttgtgcatttcttctgacagcggcacggactgcatgcggatcggacatctcgggttatcgggatccattaaagaagcataataaggcgtaatgttcaggggaatggtttttacagacatcctgacgccttcttcttcctcttcggtcaaatgaatgacttttttcaggtcatcgacggttcttacagtatgggtgagctgccacagccaatcattccacttgtcttccggcacatctttccacaattcaatctccttccaatgacgcttcggctgaaaccatttgtttgtcaaacgaattcctccttatgaatggccaaacgtaaagtcttgcaccatatattcatattttcgagcccttctgaaatgcggcagttgttcacaagcctgcctctgtagccgtatccggcatgatacaaaacggcattcatcccgtaagacgctgcacgggccaaggaaaaaagatggatgattccccggcccgcgagttcctgctccaacgctttaaacaagtgtgccgttacggagttccccctgtaatctgacagaaccgcgcaatcggtcatttcagcgtgccccaataccggattgatatctgcgcttgccgccccaatgagacgatcctgatcgaatgcggcataatagatggtgttttctctcattgtttttttaatataaaggggattaaagacaggagtcggataggtaagaaaaacatgtttatataagtgcgttaaaaggtctgcatcatcttcctccgcttttctgaacatcagcgcgctttctgtctgagtcagtccccgccgcggtgtctcatataaacggtcaacagtcgaatcttctgatacatatgaatctgaccgtctccgttcctctgctaaatagcgcaccatcacaacagcctcatgcccgttgtaatacccgtctatgacaccctcaacaataaaaagatgcttgacaaattccggctcatcgccgcgcttggcaaagaaaattaccttttgggctccttcttgctttgcttctgccaaaacggccggaataagcgccgtgatctgtccgtcataacgaatgactctgagccgctcattgaaacggtctgcatcaatctcggctgctcccttttcagccctcagttcctttatcagctccgtcacccccatctgccaccccgcaccattccatgataaaaagagaaatgattttgacggcatcgattaacgcccggatttcaatgtattcattcgcctgatgcgccgctttgacttctcccggcccgaagacgatgaccggcgtctgtcccgcgtgctgcaaaagccctccgtccgttccccacggggacgcttcacgaaccggttttgcccctttcattttctcaaaagaagattccagagcggaaatcagcggatgctcatccgggagatcattcggaagccactgagccccaaaccattctatttccgcggggtggtgtttaaaccattcatcccggtactccaaatctttcagccagcttgccagctcttcttttactgcttcgggcgtttcatccggcgctattccgcacctgccttctatcaccacacggtcagctaccgatgatggccacgttcccccttggacggtgccgatattaatgggaaccggaatcggaacgtcccgataaagcgggtctgtgatacgggcgttgcggacgtgttcaagctctttaagggctgtgatgacatgcaggcttttttcaatggcgctcaccccttcatagcgggtgccgccgtgtgcggacaatccccttaccgtaatgcggaaccacatagacccttgctgcttaacaaacagctttaaattagtcggttcgggaataagcgccccgtcagccttgtagcccctcataacagccgccagtgttcccgcgccgccgcactcttcatctacgacactttgaaacagaacatctccttttaatgtaatcccgcaggcttcaagcgcttctaacgcaaacaagagggctgtattgccgcctttcatatccgttgacccgcggccgtaaactttgccgtccttttcaacagcggtaaacggttcatacgtccatgcggcgggatttccttccgggacaacatcaatatgcccgttcagtatcagtgatcttccgcccccggcccctttctttacagctgtgatattcgggctttcatggaagtcttcgcgttccgatacgaaataaggatgctctttcaaatgtttgacactcggctcccatacatcaatatccatgtcaaactgtctcagtttttctaaaacgactgcctgtgcgttaaattcatggccgaacgtgcttttttccccgatcagccgtttcagcaagcttaccgcttttgctgtgttttcttccgcccactcagtgactttcttttctaattgatccatggacaggcccccttttaagaaaacattctcccaatctgacctcggcatccgttgtttgaatgacatcgtctatggtcgtgccattcagcagttcctcaagaacaaaagccccatcatctatgctgatgacggctttctctgtaatgatgagatctgcacagcccgctgctgtaagcggcaacgaacagctttcgacaagcttcggccggcctttctgatcggtgtggctcatgacgacaaccacttttttcgcgccttgggcaagctccatcgccccgcccattccgggcacttttttccccggcacgagccaattggcgagatcacctgtcctgctgacttggagcgcgcctaaaatggtaatatctatcagcccttttctgatcatggcaaaagacagagctgaatcaaaataggaagctcccttaactgtactgacaggaaatccggccgcattgcataaaagctcatcctcctctccgcgctccggactgccgccgatcccgaggacgccgttttccgcctgcagcatgacctccatgccggccggcagaaaattcggcactaaagaaggaatgccgatccccaagttgacgatcattcctgaggtaacttcactggcggcccgcctcgcgatactctctctttctgctattcccaagcccatctccacttcactccttcactttgcacgacaccctccacgaaaacgcccggcgttacaatatgctcgctgtcaagttcgccggcaggcacaatctcttccgcctcggcaaatgttctttcggccgcggcagccatcagagggttcatgttgcgcgccgttttgtcaaacgtcagattcccgaattcatcagcagtatgcgccgacacaaaagcaaagtcagccgtcagcgctttttcaactaaataggactttccgtcaatcgttacggtttctttgttttcacaaacggttgcgttatcaatgccgatatcagttaaaataccgcctagccccgctccgcctgcgcgaatccgttcagcaagcgtcccttgcggcgaaaattccacctcaagcactccgtcagtcatttgtctgcctgcgacaggatttgagccgatatgggaagcgatcagcctttttacccgcttatgaacgataagcggaccgatgccgatttccggaaatccggcatcattgcagatgacggtcagctctttaacgccgctttccaaaatcgcttcgattaatgacggaggtgaacccactcccccaaaaccgccgaacatgatgacagattcgtccttgacatcggcaattgcttcatgaatatcgatttttttatgaaaaatagacatatcagctcaatccttcttcatcattttttcaacttcttctgcagcctgggaaaatagatctgacagctcatccagctcggcatatgaaatcgtgaacggcggggcaatgatgacggcgtctccttctccgctgtcaataccaggctttgcagggtaaataagcaggccccgtttttttgccgctttaatgattttttcggtgaaggcctgttttttcgaaaaaacgtccttcgtcgttttatccttaacgaattcaaccccgatcaggaggcctttaccgcggacatccccaatcaccccgctgcgctctttgatttcttctaatttccgcttcagcattacgcctttctcctctgactgccgaagcagctcgtgtttcttaacatagcgaagcacttcaagcgccgctcttgcacagtatgggttggcactgtacgtatgtccgctcataatgaccccggagccccgcttgatcgtttcaatgatgtcatcagacgcaacggctgccgctatcggagcgtaaccggcgcctaaccctttcccgagcaccgcgatatcaggtgcgatcccccaatgctcagaagcaagcatccgccctgttctcccgagccccgtcatgacttcatccgcgataaacaaaataccgtgccggcggcagacatcctcaagcgcttcataataacctgccggcggagtgatggccgccccggctgctccgacaatcggttctgcgacaaatcccgcgataaatgaggaaccgatccgctgaacagccgtttccagttcagccgccgcagccttcacaaattcctctccctgcagctctgaacgatacatattaggcgctgaaacggcaggaaaccgttcgagcaactgggtgaagcggtatctccgttcgtagaaccccgataatgaaagcgctcccaaagtaatgccgtggtaactgccccatcttgatagaaagacggatttttggtattgccctttttcctgccaatattgaacggccattttcatcgctgtttcgactgcctctgagccgctgtttacaaaaaatgaccaattcagcccgcccggcagatgatccgccagaaataaagccagttcttctgccggagtactggtgaattgcgagcgatacacaaacgaaacagagtcaagctgctcttttaaagcttgtataatatcctccgtgccgtggccgatattgcaagtgaccgcccccgatgctccgtcaagatacttgttcccctcctgatcatacacatatgatccctttccatgcttgactgacggataattcccgtcaagctccggtttgattaaatagctccccatatctttccacctcgaaaacccatttgcttcattgtatgaacagatgaataaccgcattcttatccttcagaaagttttttgcagaaaatacctttctgtaaaacaggctgccggagatgtcccgacagcctgaaaagcgttctggaaattctattcctattgttgattttattctttgctcagctcattatcacatcatttttgatctgaatcagtataagcagatggcggaaaattcccgtcttctttactgtatgggaatcaatatttcacacaaatgatgattcaccttttgtaaagtatacctttcgataatgggctgctctctgattgataaattatttttttcgatctcagaaaaaatagtgttccaaaatccactgactgcctcttttgtatgatcaagcaagaaaacagcgtacttccctccggaaaatgtaccgatccgggctggttcaggcacatggtcttgattgataacaagacaaacatcatagcggcatttctctttaggagtacgattcggatgatcttgcggaattcctaaaatgacagaatgatcaagcagaccattcaattgcgcccagtttttaaatgactccatcagttcattgttttgctttccgccatactctccgatgtttcggaaataagcaattctggattcaggtaattcttcaatcgttatgttcacattttcgcccccttctccagaaaggtagtatgtattaaaatgtttttcaagctgatttttcagcatggaaataacaaaaagcctgcagaaagtgatgttctctgcaggctaattttcattataggatttttttcagtctaacaaataaaagccgcaccgacgatgattaataaaataaacaataccacgatcagcacaaaagtgctggttccgcctccgcagccgccgtgcccgtaaccatagccaaaactgccgcaaccgtagccatatccgtatccgtacatacgcaaatcatcctttcttcttacgatatacggcattgtatgcgggccaactcccaattggtttatgcgaatgcccaactatgtaagaaaataatgaaaaattgtatgcacgcgccgaaatcttttgaagccgagtttttcataaaagcggtttacaccgtccatcccggacgtcacaaggtatacggtttccatgccgttcagctttgccgccgccatcagctcattcatcaatatcgatccgtagccttttcgttggaattgatccagaattgcgacttcttctatttttgcggttttatctgctttgttgatgaaaagctctccgcagccgatcggaatcgtttgcgaggcgtcgctgtagcacacaacaagcatgaccgttccgtccttatacaaaggatatttccgctcaagcttttgttcggccgccgcctcgccaatgtaaagggcgtcatagatgttcataatagacgacccgtcggcgaggctcttttccgtcccccaagcagtgagcgggtgtcccgcctgcaggtccccattttccagtttccttgcaaaaaacagctcatcttccactacgcagccctgctttacgagattttgtttcagaagaagcggaaacgcgtgctccggagccgctttcacatgaatataattggcttgaagcaagcccggaacggacgaaaaaaacggcagcagtttgtctaacggaaatgtacggtgcagctgaacaaagttatgcgaaaaaatctgcggcaaaaaagggtccgtatatacactgaaatgctcgaacctctgaatgccggaagtaagctctatatactgcttctcggttttatcaaattgatcggtcataaaagctctccttttccttacacatccaactgcatctctcaaccttttgttatattgagatttctcataatttcatcgtacaccggatagaacggcattccaattggtaattgtttaattttctgaaaggaaatgggtatcgccttctgattcgcaaaaaagcgtttcgctacgtcatgactgatcggatggagaacccctctcaaataaacataaaattcccgttcaatgcgaaacagcattctcccgggcagatgttgaatacagcccgatgtctcccggctgatcggcggaccgtccggaagcgattgtatttcggcccgctctaaagccgggatgtcatgctgtttaaatcggtaaaagcgaaatgcgctatgatcaaccagccttttctccccgtcttctataaaataaacatgaaactgatccctgacgagctgaaaattcggaatactgacggagttctcttcctcatattgaaataaaaacggatccggaatgacgacggttcggccttcatataacgaatgccagcgctcgtttacaggcttccttttatttcggtcaagctgatatactttctgatccgtcccctttacaaaggatccgtcgatcaggacagacggaagcgattgatacgtgttctgaaatgagtggggtgttttataggtcgtatccaacacttcttttatcggcagaaatgatgtaaatgtgttgagcctgctccaaaaaacagagtctccgtgattccaatgcataacatcttcgtcccaaaagctgccgaacttctctttcacacgctcaagcaatgatctccggtgcatcactgaacagtgatcaacgagaaaagcggcctgatcaagcacctcttcagcaaaacgatagaagtggaattgttctgttccgcgcccgtttacatgtatcaccttctggctggaatagacggcatcaaactcgctgtattgattaagcgcttccgccatgcggctgagcctatccggatgaaatacagtgtcgtctgtcaaataagtgatgtattcgcctttagcccgtgaaagcgcatcattaatcaaaacggcataccgggtcgacttcagccgttcggcaggattgataaaactgttgtcataatatattcgaggatcttttatatacgtactgatggcagccgaggtttcttcatttgaatgatcatccattacaaacagctcccaattgctgtaggtctgatgcaaaacactttcaatcgcctgtttcacaagatccggtttgttgtaactcgttaagataattgagatcttcttttccatcccatcaccccttctgtaaaacataaaaaacggctccgaaagagacagagcctgatatccgttattaaaaagcaccccagctgacgatgcttgaaatcgcgacgtttgatctcgtattattgagcggattttgaaaaacggccaaatctgacagcacttctttgacaattacgttttgcagtgtgctgccgttaatcagattgacgcgtgatacaggaaccccaagctcttttgccattacaagctgacgccgcaaatctgaatgatctccggacggctgacgggataacaaaagaagaagaagcagtacgagctgaaattcctcctcaaaacccccgtgttttacagtttcttctgaatccaaagtattcctctccttcattttttaatctatacaacgtatgtcatactcttacaaaccgcataggcaaacaaagcctgattcgaaaattcagctgtttgattaaatattgaaaaaaacacaagcaaaacggcattcgacttataccaatctcttcaatcaggaatatgaataaacgtgaggttgaaattgttaaaggaggtgtatgtccgcatgagcgaagatcgtttggagcttaaaaagaacttattgaaaactcttttagcccctgtatttgacaacagcgctttatctagcggtacagatggaggagataacgtgaaaaacagcgtaaaagaattattggaagcggcaattgatgcaaaagtagatgaagcagcggtgaaagacagtctcagcgcacaatctgtattgggaagcggtatttcattagcggcgagatggatttttgcaagaattcagcccggcactgtcatcagcattgtgatggattcaggagacatgatcggcccggttcaatttgttgcctttgacgaaattcacggaatcgtttttgttacgcaggaaaattccgttacaccggcaggctctgctacaacattgcttgacgtcgacaaagttgaaagtgtcacgttcacttcgtaacagcatatgaacgttttatatatccgttcaggatataaaggcatatacacgtattttgaccgctggatcgaggaaggctttttacagtcttccgtccgctttttttctgtttctgagtttgaggaagataccatccgcagtatacgggcattcaaaccagacatcagtctgatgatgacgggagaccgtattccgtctgaatggcttcaatggctgaagacagaacagattcccgtttatctatggatgacggaagatcctttttatttcgatgtgagcatgacaatcgcccctttcgccgatgccgttttaacgatagaacaaaacgcgcttgatgcttaccggcaaatgggcttacagcacgtatattatgtcccgatccccgttaatcagcggctttttaagaaacaacctgctgaatcttctcttcacacaaatctgcttctgatcggatacccgtacccgaaccgcgttgaactggtgaaagcagcggcgaagcttccgtatacgcttcgtattatcgggaagggatggcgcagacatctgcctaaaaaaatcgccaggcagcaaaatgtgctcgtaatggatgaatggattgcacccgaacgtgccgcattatattacaacagcgcagacgtggtcttaaaccctcaccgttcttatcggtttgcgctcaatcagaacggacgcggcatcgaaaatatcagtttaaatacgagaagcttagacattgcggcttgtcaggcctttcagctgacagacctttctcccgcgcccccgttttcatcctttgtttcttacagcgggcttgcggattttgcggataaaatccatttttatatgacaaacccgggtgaacgtaaacaaatcgcggcgcttaattatcaagagacagtaccggcgtacacgtatgaccagcttccggctgtgcttgcggctatccgttccaagactttctcatgaaacgctcttcacatcaaaaagcagcttggataagctgcttttttcatgtttattttccgcttctgtcagtcagttttctcgggtcaacctgtttattgacctgcgggtgaaagccgattttatcagcgattctttcccaaggcaccattttaaaattttgattggccttttggccgtgatctatattttctccgtcctgtgcgacaaaaaggccgaacggatattcaggtcccagcccgaaacccagaacgtcaattccgtctgtatcgcttgtgccgtctgtctcaggcccgtctgttatctgaaagtccgcaacatatttgttctgtccctgtctttcataaatcgcgtagctgctgttaccctggcttgatgcaagcaaataacctttcccgtcagcagcgtagtaaatcgtcagtccttcaatatcaggggttaaatgcctgccgtcggcacgatcgatcaccgttccgttactgccgccgtccggctcagcgctgaacttccagatggcctcatcttcttctgcgatataaagactgccgtattcatcgtctgctgccatcccttctgtctgagaattcattttaaacgcccttacctttttgccggatatgtatccatttttatcagcatttaattcgtattgttcaaattcgccttctttccctgtcaccatcgcgtaatattttcctgttttttgactgtggtacaagctgaaaccgtatacttcatcaattgctgatgaaatcgggcggtctggatccgtaatgctttgtaatgtgccgttttttccgtcgatggcgtaaatctcaatggtattctttccttcagaccgattggatgccgccgcaatatcaactttttttccgttcaacggaaaatcatagcggatatcaacattgttcagcttcccggtaggataggaatgaagcatctttccctctaggctgtacacgactaagcctgattttttattggttgtgatcaatttgctgttctgaggattcttggggcccagccaaatcgcaggatcatcagctgcatcacctgctgtatcaaccggctccgtttccgccgccgcattcacggtaaaatgataaggatcagacagcttatgcttggcctgggaagaaaccgcaccgcatgtgagcatcaatccggctaccgcggttaacaaaagtgtttttgaatgattcattttccttcctccttttatgaacgtgcactttaattgtaaaatacatacaggaagttcagtgttaagtttttgtgaagattgtccgcatgtgagaatttatgaagagaaagaattgacgtgagcaaatatttaaaatgaacatttagtacaatgttttgtttgtgatttctattctattaatcgggtaaagcgatatgaaagcgcattaggttaatgtttttctctaatttttgatttattggtttctttcattaactcgctgaaattgttcaacatatgatgcatggtagagaaacgagagttggaggataagccatgcctaaacagcaagcagtagagctacaaccgttttttcacgataaaactgttctcgtcacaggcgggacaggatcaatcggaagccaaatagtaaaacgccttttgctcttaacccctaaagaagtcattgtgttcagcaaagatgacagcaaacaatatgtgatgaaacaaaaatacgcggatgaacaaagactgtcatttgtgctcggcgatgttcgtgactacagaagagtcaaccaagtgatgaaaggtgttgatattgtctttcacacagctgcgctgaagcaggttccgacatgtgaggataatccctttgaagccattcaaaccaaccttatcggcggacaaaatgtcgcagaagccgctttgctgcaagaggtgacgcatgtgattaatatcagtaccgataaagccgtttattaagatacttactacaaacaaatcaaaaaaagaaaacaaatcaaaaaaagaagcttactctgcactcctttccaaagcagcctccaataaatgctgagcaaattgtttataaaattcatctaagtcatcactggcttcatcctgttctatatagcggatactgtaattatctttatggacaacctttattgttttcttcttcaattcctcataacgttggtaaggttccaaaactacacccccgctttcacaggagtattatatgtatgtaatggttcgtctcttgactgttctttctttatcaaaacctcgcaagcttgttcaaatgtacggttaacttttttctttatccagcgttcagtaccgatctcatctcatatgaatacgggaatgctggttttattcaaggtgcccagtaattcaaaaatgtgttcttggcatgtgccttctctgcacctgagtcaacaatcgtcaaataaatcttggggcaggattaagccaccgcgaatgaggtaaggtttgaagacattatttctgttcaatatgccgcttcagttttttcagcggtattcctaggaattacagaatatgtactaaatactttcaaactttgagatgtttgtttttggcggtgaagattcatttaattttttataccaaatacgaattttttgtcctttgctcaagtcatctttattgttaagttgactaagtcccagtaatactatatccgatctatacttctcaataatctctttttcactaagatttttaaagtctttagcatcagctttttcattaggtatgagaattgcttgattctctctttttaaaatgacatagccgaccatagtttgctcagcctccataaaatgtttgttatgttgattttgacaccctaatggtatacataacgaaatgaacaacagtaaaaacactctatacaaaatcaaaccgcccttcttgcgtatttgtaacaagagtaaaacactgtttaggaactgacagactaaaacgcctcatttttaacggttttaaacaacttccccgaagtcatggaacacggcgatatcttcaccatcatagaaccgcacaattacatcactaaatccaaattgactgatcaaccacacacataaccttggtaaggtctgacttataagtctatacagcctttctgcaaaatcattttgcttatctctaagcagtttacattaactaaggatatgtacagtttttcagacatgttcagcttgtccttgaaatgccggattgctttatcttgttctttacttaaaatgtttatcatttaatcatgctgacttaatacaatgtttaagtgtttttatatggggggaatatgtgtaaggaggcggtttatttgaaaaacgatcagaaaataacactaaactcttcttttgcgttatccactcttattgtcttacttattgcattgtacccgtcctattcttcttggtttgtcacaatattctttttaggatttgcactaatatacacatttgaaaaaaagagcaaatcttcaaaactaattgctattatctcttatccactatttattgttgcgtttgtttacagcttaataaacagcatgtaataatcctcccacctaaggcaggattattttttatcacattgcagcaacttttgggccgcctttgtctgtgatgataaagctgtcactcccgattttttctttcgatccttatcttcatcaatcgttacaaggtgttttgtcattaaagttgcccctgccatcttaaattcctgcctatccttaaagtaaacaatttacattcacctagaatgatcatattagctaatccagctaaataagatgaccaaccccctgtaggcaaatttaaaagcaaatcctatgtttgaacgacagcggcagttgagtacttttcaaatttggtatcccgtatgtagttccggcatcctcccaatcatctgcagttgtcgagtaacttagggtcttaatatttgaggcggttttaagttaagtatattgactgattgattaaaggtagatgttgctttcagtatcattcctagtctgagttagctctttcgcattaactcctgcccaaaatcataaagcaaaccactccagtaaaattccaatcttgtcaatggtgtttctcaaacctaattccccctttgagtgttttaatgatattacactcagacgttaccctgaaaatatccataaaaccatattgtatttaatttgtttttgttaaaattacagttttattgaatcttctccacggcataaaatgggcatccccaatgagactttcggttcttttttaaaaaagttgtgtctcgtataataacaaaagtatgtttttaaaattcttgttccttcttttataactgaaaattttcaggtaatatattgattttattacaaatatccaatatagttgtaaatatattaaattaatggttatttaaggatggtgaagaaatgaagaaaaaacttatttcatttatcatggtgttcacgttggctgtgctgactatatcagttgtttctcctggctatgcaagtgcagcagaaagtaaaaaagcacctgtagttcaaaatagcgtacaggctcctttagcttcaaattctgaagtacatacacagggcattcctttcgctaaacaaatattagtaaaagcacttagggttggcggtcccgctttaggaaaccttattaaaaagatcccatataaatgggctcaaaaagctggtgatgcttgttctaagtggggacacaaagcggcggacgttatagatgaacttacaaatttcggagaaacagctgttacggtggccttagtgaaagccggaattccattagctgatgcacagttaattgcgaaggttgttgtgttctttttggtataactatacattaaaaacaagagagtgaggcttacaaccttcactcttttgttttaattaggtaaggagagatcaccatgaatctgcttgttatgacgttatcaatttatcttttatctctcatcgtcttttttatttttatgtacagaggagaaaagaaagaagctgcagaaaaaaacacaaatgaaaaatttttattatctacagtaataggagctttggttttatcactcattcctactgcagtcataatggtgataatcttatttgcaacaggatcagcaaatgtgcttgtaagcttctttgaattagaaatagaatttaaacagattgttataacaagtgtgtgtatggttgtttattcttttacttttgataatatttttgtggctgttggaaggcatctcattggggataacttcttcaagtttatatttgcctcattgtttaggtttttattcatttatatagtgggtatcttatgttcaattgggaacagcgacaattttaaattatcattaggattaactttattttttcttttgttagaatgtattttccctaaaaagtctgatcgtgcccagaatttaaaatcttaaggacgggcatttggtgagaacataatgcatataaaaaaggaataatgttcaaaaagataaagcaggcttaatgtctgctttatttaattaaaatccctcttcatacagtgctttctctaagaaattcagctcctaaagctcacactgaaccttcatgctttatacttcgtcaccacaataaagtaacaagcaagttcccagaactctcgaatcttgatatgctcaatggtactgttgtttttgcagcccaaggtggtgttcctggctttgagactgtaatgggacgctagcttactttaatctgccaaagaaaagcatcttgaaggaatcgtattaaaaaagcccccatgagattaataaacattcttatagctggctgaaagtgattatagatttaagactacatggtaaaccccgcatacattcctttgaatcttggagagtataatctctccgttacataactccttaatgcttagccccttaaaatgaactgaaaatttagtacataatacaataagttatccttcaccaaatgctcttcatattttgtgacagattcattccagtttgaataaacctattgacctcctaaaattgagtgttattatttacttgagtttacaaataaaggagtgtttaatttgaaaaagttgtttagttttattgtttgcaccatggtggccattctttctctgagctttgccactgccgcatctgctgagaccgacaattctaggttttcaactaagcttactagctctgccgaaggtgaatttaaagcttttggtcttaaccctcctaattcaaatagcattgtaaatcttacgaaaaacaaattgacattcgctggacaagcaactggcaatacattatattcaaacagttattttcaaggaaaatcttcgataagctattcaattacaaacaatattggaactaaactaactgtgaaagtttggaatgattccgactggatttttgctactgaaacactaactgtaaatgctaacggtacagctacaggaacaataaaaaatctagatgccaatgcgctttactatctatctttctctgctccgagcgacttttctggctatgttcaataaaacgtaatttaagctccattcgtggggctttttgtattcattaaaaactatcgtaagacagaaatggattatttgtaaaaatatgatatattggtaatacaatcgaagattcaaggctcctacacaaaaaacaagccagtgatagaatccttcttcttttatctagacttgttcagctctctccaacatttcaaagaaattgtgccgcaattagtttggcattgtagtcttcaacctctttctttgtgctgcccaatttatcaaaagctactcgccaatcaccattatgaatctgataaaagatttaatcctcaagccatcaaaacaaacatctaaaattagcctgttgcctgaagtgccatcaattttgctaaaggcagcttctttattgtcaccagcataatgcacctctttaattgattcattggtaaagtactatttccctggttgctacataggtttcatttcttcctcttactccgtttaaaatcacgatttcatcttcacgtcctagtgatcttaagtcctttctctatatatacgcagagcggtattatgagttcgcacagtatttaatgaattgtatttgatatcaatcacttcaatattaattgactctgctcttatgaaaccatttaatagcctatcaatttcaacccattcatcattgcaatattcatcttggaataacgttattttaatcattggctaacccttcctttaatgaactgctttcgtttaacttacggaaaacatattaatctgctaacattaatagctcatcgactttatcattgtattcaccatattcaccagagtcccattcaacacctacagaacctcgatttgtcgtccacaatataattcccatttcctcctcctcaaagaccttacttgctcccctttttgacaaccgagcatatttcaacccctttcttaaaataatcacatttttaagttaactttaaactgcattatgttgagattatcacctttaattggtaagctgacatctaaggtcatacttatacaaagcaggtgatatattgaacaaaataatcggaatgaccggattaattatctccttacttgtgcaagggttctcagcaagtgattcattgactcataagatcgccatggcttgtctatttttgttcttattggtttataattttaaccatactaaggagttctctaaaaagtctctggcgattataggcgcttcctttattgtgctaatgcttggaatttatcaattgctcttttttactggtgattactttgaaagtcgcggtttaaattttggatttatcctcttacttgaaattgttttagttattggattagtgactgctgcgctgagtttaattaagcatattgcagaccgcttaaggaaaacacctgatggtaaagagcgttgactctttgcctttttttagctaaccatttctttttatgccgtctttctatgtacaaaatcaaacgcaatatcgacttttgccggctctcttctgtcaaatgatgaattgactccagacattccaccttaatggactctttttcatttttcaccagaatttcttgatcaattacctttttgacactttacaaaagatccagtcgcatttctctctttgataagagctctacatttctaatagcaagattgaatattgtttgttaatacacttggccccaacttttgtgtcttagaatttgaaaggcgtacttgcactttaacatttgtcatttcagccgatatggaatcaatccttccagcccaattaggactctctccctcgggagtcggatatagtttaaatcgccaactgatttcccctgttttggcggcaaatccttcataaccgtcgtagcttccataagaagatggctgaggaaggtggacagcaagaatactcatattcgttcttgcagcacttggcgggtataactgcactttatagattagtgccgcacccttcgcatttttcagtttttgatttaccggttcgagtactgcactacaaggcattggacttgctttcatttgagttggagaggcaataacagcagccaataacggtataaccaagataaatcgtttcatctacattccctcacatttttttgttaatttcccttactcccgccttgaatattcatcacttttgaatggttagcttcattaaaaggtgaaaaaggcagtactggagctaaaggagctacttgcgctgccggtaaagatcgaaaatcagcatatgaattagccgttcaacaaggtttctctggaacattagatgagtaacttgcttctctgaaagcaacagcaaactgatcacgtacccttctctaacaaggagggtatttttttcgttttttcaaattagaaaatcccaaaatctctacatccttttacaattttttcaatgactatgttatgattattcccaaaggatttttgaaattttcagaaagaggggtttggatgagtaagatcgcttcagaagttgttgctactacactgaatgattggtacattgctataaagaaacaaaaggtacatgagtcaataaaatattactcagagattaaaagcctgttcgatgatatggaagaggatcaagaagttcttgcatattacagtttattagaagaaagacacaaaatgttgctacactcttcacgcggagagcctttacaaaagcacacttatttcactgaagagaatgaaaatttcataaaaagaacgaacgataaattggaatataacttttatttattcgaagcaatgtacgaggcatacaacaaaaattatgatcgagcaattaacttatatggattagcagagaaaaagcttgcagaaattccggatgaaattgaagcagctgaattctactccaaggtctcctacttatacactcttgttaaacaaagcattgtggcacaacactacatcaagaatgcaattgcaatatataagcgacaccctgattataaatgcaaactggcaacttcaacaatgattgctgctgcaaactattccgatatgaaacggtttgaagagtcagaaacatattatttagaagcaatagacattgcacaagaaacaaaggatgaatatttggaagctcagttatatcacaaccttagtatcgtgtattctgattgggacaaacctgataagtgcattaaatctctcgaaaaagctattggaaatgaatcttggatgaattcaaattattatataaattctttattcatgataattaaggaactatttaaaattgacgaaaaaatgaaagccattaatttttacaataaagcacaggaaagactcatattaatggagaataagatatacgaagccaaaattagcatcctatacaacctatattgcggtgaattaaaaaacaacttcaataattgcatccgttatattgagtttttaaaacaacaaaatgaccttgaaagtgtagatgaattgtcctacatagctgcaaaaaggtttgaatcaataggtgcttttgaagaagcaacaagctttttcaatgaaaaaatttgggctgaacagaaaatgaatcaggtggagggaatcttatgaaaaaaattgtgctttgcgtatctattttaactgtaattttaagtggggtagctttaacgcaattgagtacagattcaccatctaacatccaggtagctgaaaggccagtcggaggttaaaaattaatttagccctactcatatgagtgggctttttattttatgatttgtgatcacctgtcaaacctgttctatgcaaagctgtgcctccaggtgtatatgaaacagctcgtaagatcgctttagatccgtatttatttcttatcccatccataacaaaattatggaagcatgggctggaaaaggggtaaggaattatcagaacaactggggtaagcgattcaaaagcaaaaagaaacagtatgttaagggcgcagatatctatgataaggtaaaggcccagagatatgctagtagtaaaacaggtaagtcttattcagttgctgcaaccaaaaaaatacaaataaatattattgctctaaacttgtgtggcaatcatacaaaaatacaaaaggaaccgacctagacagtaatagaggcgcacttgtcacacctgcagatattgatcgttcatcaaaaactgttagctactaatcattttacttgcagatttattctgcaagtgtctttttattttatataaaagataaggagcgttatatgaaaaagtcttatgttttatatgggatttcaggagttctaattggtgcaatagttatattgttgatcaatgcattctttataaataaaggtgaacactctgtaagtacttctaaaattaatccaaccgaggataaaatcttttttatctattcaaatccacttatcaagaaaagcgtactcatatccacatcacaaggagaagaatttaataaacgatactttaaggtaccggatataccatatatccagaaaaaaaccccctcttcagacgatatcgtcttgttagctgaacatgaaccatattattacacattaaaaaacaacaccattaaagaacataaattatccaatccatttgctttttggtatcaaggagaagatatttctgtaaaagcctataatgtcgacaccaatggaaatgaactgaaagtaaatgataaaaagttcaataaaaaatatagcctgactttgccctccctagtaaccatgggagaaagcgatgataagtatatttacgtcattcaaggaatgtctttgtacgtcattgatagaaaaacagaagagattattaaaacgattggattagcttcctatggagatgtatttgatcactctgaaaaatatgttgtggctagctcagaacatgaactaactgtaatcgaaaaaggatcatggaaatcaaaattcataaaatatcctgatgatctcgaacaagcggacgctgtgtattacgacaaaaaaaacggtaaattttacgttacatatattaataaatccggatacgcctgcttacttgagtacgataaagatttttcttttgaaaaattcgatttaaaatttccgtatatgaatgcaaagtttaaagatcaaaaactttatgtgatttcacaagaggaaaacaaaaaaggcattggtggctatatggggatttttgatatccgtactaaaaagaaacttaataaatttgatttgcctgaagaaacaaaagtgcaggactttatggttttagattaaacataaagaataagttgcaaagcaaaagccccttcctgaataaggggctttaattttaaattaaatagatgttttatacgcgttaatggcttgatttctcaaaagcatattatctttcgtcaccattccaagattgtatgcttgtttgatgatatccagcacttgattatcggtttcagttacagctcgtccacccgttattctagatttccagtaatcgaactggtgatttaattctgaagtgcttttaaggttttgattatcaaccacttttccgttctctcgagcgcatctttaaattcatcaaaattaattgaacattgctgattcgaattacttcctgcgccttctgtcgctaaactgcaaaatgctaaaaacttagggtctttcgtaatgttgtaagagttattaaggccttccataacattcaccctctctcaaattttacaacgttgctgtaaatgattttcatgtttttcccaagtccttcaacttgaatctctcatttgaaggaagttcgttcattggaatttcaatgtatttgtcccatcctatcactatcctgttttgcccaagtagagcatcatatttgtatatgtttgcttcacctttgtataacaaattccttccgtctttggcattaatgacggtcgaatttgtatagtccataaagcgaactttaatatgcagcttgtcacctttcaaaacatttgttgcatttggtttgctgcttgtaagggattcccaagcaaatttgttgccatctgtgacggaaagaatctaaaaactgtaaagcggtgctgcttcaactgcttttgctttcgatgtgtgaatggaaaacatcgttgtagcagcaagaagtgtaattgttactaaactaagcacttttttcaattccttaaccctcttggtattattccacatgtcatttatcggtaattccagcgaggtatttaacttaaatacaaaaaaagaacctgattctaacttggttctttcgttttagtaactgaatgggtttttgacgacatataaatggaactagtgtataatgtttcctgtacattaaagcatgctcactcaagggagtcttgctcatcccctacgaaagggggtaatgcttatgtcaacatttcaggcattaatgttaatgcttgcattcgggtcgtttataatcgccctgttgacgtatataaataaaaaatagacctcccttgagactggaatcctgaagaggtctatcacgaataaccgctgagcaagccctttgatgggcagctttttgtacaaagccggggtgttggtagcaccctggtctttttattttatgcatttcacaaatcaaaatgcacaaataatcatataactgtattacctacactaattataaccacataaaaatggtatttgcaatactattgctttatggattaaaccactttcactttgattgagaatccttgctcctgcttacctcatcacaattgcaatacttttgcttaactgtttaataaatcatcatctagctcaatagataaaataccatcgtcttcatcatcctcatctgatacctcttcaataaacagactttgaatgaagtcagagaaagaatttgcgaccaaaaatgtgtcttttactccatttgtcaattcatgatcccaaaaataaactttccctgtttcttctcccttcacacccagacaaatttggtctcctccatcaccatcagcaatcggaataatccagtctggcatttgttcttcataagttactgtcattgatttaacatcaaagtcagtatcatctaccccaaacccataaaatagccctaatcttaaatgattattactagccaatggattttcttctaagcttggaaatagcacattgtctgcttgtatcgtgcttcctccatatcttattacaaattctttgtacacctcatcgagatttatatttaattcgttttcaaatgctttaatttttcttttgctttcttgttcatttcttgatgtgtaatgattcaaatcaaaattgttcattttttcagtgatatcgtatatgctcattccaaaatcccctcttaaatcgggttttcaggataatcagctttatattcctcaattatcccttttagagacgcatcagacggttcctcacctagatacttatgtttccaaatgatgtgttgatcactgaagctataatcagtgctgaaccaatcagtgtaatcaaaactgatatttaatttacctgttctttcaaggcttagcgtaaacgaataccataattcttgatcgttctccttgaatacttctcgtagcttctcactcagatcaaacaactttctctttttctcagtaaagtcatcttcatcaattgtaaaaataaaaggtacttctaagctatacttgtaattttgtggctcgtcaggggtattgtaataaaaataagttcctcctcctgtttgcgaaacttgtgcataaaaccaaaacttttcccattgctcggggatcatttcatttattgtttctgcaatctctttatatagattgttcagctcagtctccgtcatatgcatcgcccaatgtaataaaattatcacttagccaataccaatgccgtcccttattatcaagcaaccgttgaagtaaatcagtaaatgaagtggctattacctgtgtttcaccaacaattccatgtcgatcaaaaaagctatcgtaacacttacctttacgatcttcatttaaatcaattgtcagatattctccttttccatccgtacaaacaatataccactcggatgaaatatcttcttcacaaagttctccaacaataacggggttagccaatttaaactcatgtggacttactatatatattggataatccgcattttcgaataaaactgctccgccgcattgctcataaaattcactaacatctcttggtagttgatgcttctcgtctattgtcgggagaccatcagcttcaaacagccggcagtctgatgtagaagcaatcttcttgattaacatatgaatactcaagtccacacctactttctaaaattgtattgattaaatgcattataatattgctgtctcgcttctataggaacattagcagcatcaaacattttctcagtaagttcttgtatttctctaggggatacttctttccagtttactttgccgccaactttcttccctgttttttcgaacaaccattctctatatactttcttggtagcgttgtgttgttccttagttaaagctactgttggtgtgttactccctctactcacataattcggaacattgtgtttagcccatacgtccattacaccgtgatgattctctaagggactgttacttggcctataatctacaacatcgaaaggttttacttctttatctgactttttagcaaaactcattagttgattttttaagtttgctccatccactacattgtatggcacgtcacctgtcagagcaagcttatacttaggattatacggaagcaaatctggaatcttgacgtccttaattctcttccctgcctgccctaccttgtttatgaccttgcctgctgcatctgctttgttaacggctcctgcgcctttcgttccgacgacagcaacagccactgaaccgaccgcatatgtcacccatcttgatctggaatacgcatctccatttaccatatctttttgatacgattcctcgattgctgccgaaacagcatcatatgttttaacaggatgaagtactgcattccccagtgctgacaaggtttctcccggatcggttatgaagtcccataaaccggttaccgtgtctttcccgacatcatatagaccgacgccggctccttttaaaatatcccaagtcacttctccggcttcttccagctgttttgcttgttcaagctgaatgacatattgctgctgggaaggttcaaggttttcatagccgatcttatttgcaatttccaaatattcatccggatcggtcacaccgtcagcgagctttttcttcagatccttgatttcccgctcttttgcttcttccttcttaaacgttaaatatgtgtctgaatgtcttgcaatctcgccttttttcttatgtatgtcactttccctgtacgccttggcattatagtgaagcggagtggcgttttttcctttgcccgtagcgttttggagctgttgaaaatcggcctgaatgaaatgttcgtttgcctcggtttctgcgtattctttcgttagatcatgatcaagctttccgagcttatgtatggtctcatcccgttttttatctgctgaatccagcttttgatcgacatcctctgtagagaaaacatcaagatgaacaatatcacttatctcattaagaatatccctcatttcattgcgctgctcctgcatgatagcttttgatttattcttcgcatggatcagctcgtgttctaaaaatgactcttccacaaacgaatcggctaatccggcatcagctacttttcctgaaatactgttaagaaaagcaatcttcatatcgatcagatcaagccagctgtctgtgacaccagcgtgatcttggaagaatgctttgatgttatcagcacctttacctgaaaactcactgtcatctaaatcagccattccctgaaaagctttcctgagattaataaattgttctctaatctgatcgtattcttttgctcgcttttcagctgctgagattaacgaggatgcttcaaatactttcatatctatctcctttccacttattctcatctaaattttaccacaacataaggcatctaaaggacttctttctttttgttaaagtgcttttgtttaggattcagaaccctttaacaaaacctacagtttcatccgatggttgtaccgaaaacctcctgaacttatagtacttcttaattgacaataatgattagatgttatattatttgcttgcgcaagaaaatacatttctgagtttggagtggtttgatgtcggaagttaatgagatggatttacttaaatggttacaaattatgcgtcgatactatataaaaaaattagatcaaaaactcatttcacatcatttaaattctagtctttattattatattgttaaattatttgaatttggtgatctcccccaagaaaaaattgtgcagcttacaggagtaaatcctagtaatgtaacaagggcaataaaaaaattgattgagctgaattttatttgtaaaaaagaaaatcctaatgaccgaagaggttttttattatctttaactaaagcaggggaaaaaatgtacccaacgatcatggaaagtatcgaagaggtaaacaatgagtttctgtcttcactttcacaaaaagaaagaaagtattttattgaatccataaacaaattagcaaataagtaaggatgtcctattcatgaataaagaagaaaaaattcaacaagtcgtaactattccttctcattatcgattagtggagaagcgaacagaaacaagaaatggtaataatgtaactattttacgctatcaaaaaaacggaaaattcattttaaatggaccaagaattattgctgtatttgagggagacgaaatgatcagtttgaaaaatctctcagtcgttcccgaaggtaagttcctatccacagaccgtgcaaaagaaatggctgaagggattttttcaaagataaagcccagttatgcaatgggattgtcttttataagaattgataatcaacaacgtcagtttattgatgagaatggaaaagttaatcagttccctatccaatggattaaatttggtcatagcaatggtagctataactgggttaccttaggagcgaacggatcgatcattgaaatggaaatagattctcactgggattatttccgaggccgtagaaaaacagaaatgtgggacaacgatgattgggttcttgctagagaaggaaaaggcccacaacttccaattcctaatgcactagcataacaagcaaatttataccgggggtaatgattcatatgaatgaattgcaatatgaaaaacaaattaatcagctaggtcaattaagagaaagacttcgccaacttgaagacgttgattacgtgaccgcacattacaaaggttatagcacaagcggagcaacactagaagaaattaaagaagaaataagtattttaaaggtaaaaatatcgaaacttgaaaaacagctagacgatatcggttggtaaaaagtatggcaagaaaacgtgggttaaatttgagattcatcatcaacttccaaaagaataatggcggtggaaactagaaaagcaatttaattcctcttgatgtaggagtgaagtagatccagtgtggcttcctatacaaaaaagaaataagaaacaaataattgaaagactccaaatcggagtcttttattctgaaacatgtttataatactcttgtatattcggactcacttcccaatatttcgtcccgttagaagacactaacatatcaaaccatatctcaaaattagaatctaagttaactgcatcttcaatatcatcaattgaatctagatatagcatataacctaatccgtttcttgatttgtttgtgtctattacatatcttccatcataatgatatccaattaggacgtatccctcggggaaatcttgaacttcattatattcaataattccttctgtgctaagtaattcaacaccattaaacatttccattccattgtgtttaaacaaaaactctttgtaatcattagggaaagaaactcctaacttcttttctagattagttacttcttgagggtttgctggatctctgaaatgaaaagtagcatcttccatgacatgtcccccatgatgaaacataggaaatgtaccatatttagaaactgctttcttaataccatcaagagtcatgtgaactaactttccttctttcataaaatctcctccttcacaaacacgtccactaaattttaccacacaaaagatgagaacttttaaataaaaccaattttacaatcattggttttatacttataattaggaagatttgtccgataaagagacagaacaaacaaatttgggggaattacattgaagaaattgttgttaggtattggagttttgtctctaagcttttctttagctgcgtgtgggtctgattctacttctacagataaaacagattccgatacagctaaaacatcgcagcaagaagaaaaggatgcagaagagacaaagacagacactcaatcaaacgacaaaagcaataacaagaatgaaaaagccgaaaatgcttcaaagaaggattcgtcggataaaaagacatctgacaataagaaaaagctggtcgatgtaacacttaacagaacagttgatgggaatacaattaaagttaactataaaggcgaagtcaaaactgttcgttatttacttgttgacacgcctaaaactaagaacccaaactcttgcgtacaaccatatggtgaggatgcttcagcaagaaacaaacagctggttaacaagggaaaacttcaactggagtttgataaaggagatcgtacagacaagtatggcagaatgctggcttacgtttatgcagatggcaaatcagtacaagaaacactgcttaaagaaggattagcacgagtagcttatgtatatgagccaaacacgaagtatttagacacgtataagaaagatgagcaagctgcgaaagataaagacttgaagatttggagtaagaatggatatgcgactgataaaggatttaatggctgcgtaacgaaaccgaagaaatcagtaagtgtatctaagccggctcaaaagtcagttacaacacaccaatccgagacacataaatcgaactcaagcggttcagcatcaagcagctcttctaactctgcacaagcctccccttctgctggaggaacagaacactttgcaaactgcacagagctgagaaagaaatatccgcatggcgtaccaagcactcaccctgcttatacatctaagatggatcgggataatgacaactttgcatgtgagaagaattaattattttgaagtcctctgaggcttctttttttatttgggtattttcttaggctaaacaaaaaaaacataagcgtatgagcgagctctttagcccaacacttaaagaatacagcccctacaatatttattacgttattttcgtattcaatgtcagacagaatattgtacgaatacttctctttttacagtaaatacaataaagaggaggtgctgattttttggagttaaaaaacatcgttcattcttacaacattacaaatattttgggttatcttagacgctctcgtcaggatatggagcgagaaaaaagaacaggtgaagatacgctaacagaacaaaaagaactcatgaataaaatactgaagtcgattgaaatcccctatgaattaaaaatggaaatcgggtcaggagaaagcattgagggccgccctgtttttaaagaatgtcttaaagacctcgaggaaggcaagtaccaggcaattgctgttaaagaaataacaagactcagccgcgggagctacagtgatgcgggacaaattgttaaccttcttcaaagcaagcgattgattatcattacaccatataaagtttatgaccctcgaaatcctgcagacatgcgtcagattcgttttgaattgtttatggccagagaagaatttgaaatgaccagagagcgtatgacaggcgctaaatacacatatgcggcacaagggaaatggatttccggactagcgccttatggataccggttaaacaaaaaaacatccaaactagtcccagtcgaagaaaaagcaaaagtcgttcaattcatctttaacatctttttaaatgggttgaatggaaaagattatagttatacagcgattgcttctcacttaacaaaattacaaataccgactccatcaggaaaaaagcgctggaatcaatacacaattaaagcaattctgcaaaacgaagcgtatatcggaactgttaaatataaggttagggaaaaaacaaaagacggtaaacgaacaattagacctgaaaaggaacaaattgtagtatcggatgcacatgcccctataatagatcaagaacaatttcaacaatcacaagataaaattgcaaacaaagtccccctgctgcctaataaaaatgcattggaattaagtgaattggcaggcgtatgcacttgttctaagtgcggtgaaccattatctaaatacgaaactagacgaacgcgagaaaacaaaaacggcacggaaagtgtgtatcacgttaaatcactcacttgcaaaaagaataaatgcacttatgtaagatataacgatgttgaatatgccattttggattacctctcttctttaagcaacttagataataagactttaacaaaacatatcacttcaatgatttctaaatacgaagacgtaaatagtaatgtgaaaacaaaaaagcaaatgtctgaacatctttcacaaaaagaacaagagttaaaaaacaaagagaattttatcttcgagaaatatgagagcggcatttacactgatgaactttttttgaaaagaaaagctgttttagatgaagaatttaaagaactccagattgccaagcatgagctcaatggaactcaagaagcgcaatcagaaatagacagtaatacagtcagaaacaacataaataagataattgatcaatatcacattgaatcaagcacagagaaaaagaacgcgctattaagaatggtcttcaaagaagttatcgttacgatgacacaaaaaagaaaagggccaattccggctcagtttgaaattacccctatcctaaggtttaatttttcgttatcgacctcaccgtcactgatagtccctcaaaatacagtaaatatcttaaaaaaccgataaagccgtttccccggtaaacacaatgggagctacgaagctattgtccgaaaagctgtttcatcaggcaaatcagcatgttcaaaaccgcggtacggtgttttgttcggtccgcttcggcaatgtgctcggttcacgcggttctgttattcctattttatttgagcagttgatggcaggcggcccgctcaccattacggataaaaacatgacgaggttttttatgtcgattgatgatgccgcaacgctcaccctgcaatctgcggcgattacaaagggcggagaaacatttatttttaaaatggagtccctgaggcttgaagaactgcttcacggatttgaagaatatgcgttccggcacggactgcctcgccccgccgctgttgaagtgggaaaacgccccggtgagaagcttcatgaagaactgacctctcctcatgagacggaatctttatatgaatggggcaatctttacgcaatattgccggaacccgccaaacatccggaatttcggaaggtcaatctccccagatatcaatccgatcaggcgccgctcatcacaaaagacacaatcgtaaagattattgaacgattacatgaagaaaaaaaaacatagaaaaaaggcctgtctgataggcaggcctcattgctgagctttatttttcaaataaatgcagacaggcttcatagccctcttccttcagcttgtctttcggaataaaccggagtgccgcagagttaatgcaataacggagaccgcttggccccggaccgtcattaaatacgtggcctaagtgggaatcagctgttttgcttctcacttccgtccggatcatcccgtggcttgtgtccagtttttcgtcaacctcttcttcctcaatcggttttgtaaaactgggccagccgcaatgcgaatcgaatttatccagagaagtaaacaagggctttcccgatacgatatcaacatacagcccctcttctttgtgatcccagaattcattttgaaacggcggctccgttccattattttgtgtgacttcatattgcatgcggtttaatgatttgattttttcttctttattaaaagccatcttatctgtccctccaatgctcatccagaaagccttgacgtccggaacctacacggtagcgcccgtagtgatcaggatttttcttataaaagtgctgatgatagccttccgcttcataaaaaggctcagccttcaagatgtctgtcacgatcggctttttaaatatgccgctttcttcaagctgtttttttgaggcttcagcgatttgtttttgttcatcattatggtaatatatcgccgcccgatatgaacttccgcggtctgcaaactggccgcctgcatcagtcgggtcgatctgctgccaaaacagctcgacaagcttttcatacggataaatgtcaggttgaaatgtgatttgaacggcttctctgtgtccggtcgtttcactgcacacttcttcgtaagtcggattctcagtatgacctcctgtatagccggacaccaccttttcaatcccgggctgttcgtcaaacggcttcaccatgcaccaaaaacagccgcctgcaaatgtggcgatttcttttttttctgacatacgggtgccctcctttgttcatacgtggtattattatattatagcatgtataaacagaataaaaataattctgctttcaggggaagctgaacgaatgccacgctgactacatattggaggttcatgatttgaaagtaaggacacaaatgatgtatgatatggaagctttgcttcgaaaagtgtttaaacaaatcagaaatgaagttaatgaaattctagataaagagctgtccaggaacgaattcactattttgcggattctcagtgaacaagggcctaaaaaagtaacggaattcgcccccattcttgaggtctccgcaagccatattaccgcagtgaccgacgctttagtagaaaaggaatggatcacccgcatccgttccaaagaggacaggcgaattatcagaatccatattacggaagccggggagaaaattgtcgatcatttcaaccaaaaaaaaacagaatacttttttaaacggtttgactgctactctgatgaagagctcgcaacgttaatcaaactgttcagcaagctggacaaaaaacgctgacacgaaaaaacacaaatccctgaaaggatctgtgttttttttatgaaaacttattgtttcggatgataataggaaaattcaatttcatccgtgtcgagattgattttatccgcttttacatacatgccgttgtctaaaggcatttccgacagacggatctcgatgcttttatccccggaatgaacgtgcacaaatgacgggagttcataaaagctgtccatataattcagcacaaagctgatcggcaggcttaattcgcctaaggaaaacttcgtcactttcaacatcacatctccgttctcctgtacggacggttcaaatgtgacgaccgcgttaatggaggttgagaatgctttgattttacctgccacgtgcacatcgttattgatgtccactttgtagtcaagctgattcgatgccttctcttttaagtacgcattcacaaacctggcaagagattctttcgagctcgtgatatgaaagccatactcactttttgtctgattttgtattttcgcctgctctcccggcataaccaataatgtcacaattaccgcggcggcaatcacattgagtgcgagaagaacaaaaaacagcgatttccactttttcatcatttcaccctattctgctggtaacccttgtttttcaatgataccgtataatcggtcggcgatgagtgcatacccttttgcgttcggatgaaaatcatcatcctttgaaatccgtctgctgccgcttttttgactgaacaagtcttcaacattcaccgcggcggcgtgaggatctttttccagctcttttgcggcgatcttgttccaatccgttacaaccccattaatttcttttaattcaggcagcgtaaacgtgaatgggttatacatgctgacatacaccagctccgcgttttcattatatttgcggatttttgaaacgatcgccttgaaccgtttttcaaaaggtttctcttccttttggaacggctgaaccgtcagctgcatcatattctggcggagcaccttcattaagtcattgccgccgatggtaaaaaagatatagtcggcgctctttaatgatttctgaacttttttattatcaagcttttccagcaggtccgacgttttgtcaccctgcaccgcataatttttaatatctaccgttttcacatgtccctttttcttaagagactccgctgccctgccgacgtatcctgaaccgtcaggatctcctactccttcagtcaatgaatcaccgaccgcagctatgacaatatgatctttcgttttcggttcttcagcgtcagaaccggtgcgctgaacagaacatgctgataaaagcaaagccagtccggcgatcaatgagaacattcgcagcttcaatctggttgctccttccccgtctactagtggaaagtgtaacatgttttttcagatttgaaaatgtctaatctgccagtttacttgagctcctcagccgctttaacatctgacaggatatcatcatacggaaccttctgcacgccgtcataatctttaagcacctttccgtcaggtccgactaaataaaaagaagtttgatgtatgacctgatcctctccctccggctttttgacgattgctttaaagctgttcagcgcaaaatcttcaatgtccttttggctgtaaccggtcagaaaatcccagttgcgaagcgaaagcggatatttggaagcaaaggctttcagctgtttcggcgtatccttttcaggatctacactgaacgacacaatccgcacgtccagattctcagccttcagttttttttgcagttcggtcatgtgggccgtcatcggcggacagaccgtattacaatttgtaaacataaaatcggcaatccagacatgccccttcaggcttttcagtgacactgttttcccgtcttggttctgatatgaaaacggttcaatctgatagttcagcgggtcttttatcgttttccccccgcaggcgcacaagagcagcaaacaaaagacggcagcgaagattttcatttttttcattttcattccccccatggataaaacgcttacagcattcatcataaaaaaattcccgcaccctcccttatcaaaaggaaggcgctaaggaatatgcaccgttatgcgttatgttttaaaatctcttggttgaaaacggcctcgtaatctttccacttcatacggcgcttgacatattgtcggaatgaatacactgttctcacactttgtgaagcaaaaacctctctcaaataaagctcaaggtgctgatgaatttgaaaaaaataatgttcaccttccgtgacaaccggtatttctgtcacttttacctgaatcccgtcctgtcgtttgaactctaggcttttgagtaacaagatatcaatccttctttttcgattgttttctttttattatatacaatctgagaaagcgtgtctgtcattttgcgcggccgttctaaaaaaagtcagattaacaggtggaacagatcctgatctttattcacctctacgtaatgaaatcctttttgattcatccgggcaatgagcgcgccgtaatcttcccgatgcttaagctcaatgccgaccaatgcggggccgctgcttttgttattttttttcgtgtattcaaaccgggtgatgtcatcatcaggaccgagcacctcatcaaggtattcgcgaagcgctcccgccctttgcgggaaattaacaataaaataatgctgcagcccctcataaatcatggagcgctccttcatctcctgcattctgccgatgtcgttattccctccgctgaccacgcagatgacgtttttccctttaatctcttccttgtacagatcaagtgctgacacggacaatgcacccgccggctccgctacgatggcgcattgattatataattcgagaatcgtgctgcacacttttccttccgggacaagcacaacgtcatcgacgacggtttcgagcgtttgaaaggtttcagcgccgattttttttacggccgccccatcgacaaatttatcaattttctcgagttcaaccacttgtccggcttttttcgattcaaaataggaggctgcgcccttcggctcaaccgctatgatttttgtatccggcgagatgtttttcatgtacgtgccgagcccggacaggagtcctcctccccctacgcttgcaaaaagaaaatgcggttcaacgtcaatgtcatttaaaatttcgatggcagccgttccctgtccggccatgacatcgggatcgtcaaacggatgaataaacgtgcggttttctttttcacagcattccgcagaactcttatacgcatcatcgaaagtgtcacccgtcaatatgatttcaacaaattcttttccgaacagttccacttgggatactttctgtctcggtgtggttgacggcataaaaatcttgccgtgaatgccgaggtgtttgcatgaaaacgcaaccccctgcgcatggtttcccgcacttgcgcatacaattccgttttcagtctgctcttttgagagctgcctcattttattataagcccctctgagcttaaatgatctgaccacctgcaggtcttctcttttcaaatagatattgcagccatacctctcagaaagtctgtcattcctctgcaaaggcgtatgtatcacaacgtcctttacgttttggtgcgcttttaaaatgtcttttacctggatgagagagtcttctttaagcaacggtttcatttacagagtcctttcttatttaaatccctatttaatatgccattataacatgaatattcaaataataagataattattttaattttgtaaataaaaataaatgaaccgatacaagagaaaaagattttttcgatggcataaacatgttatacttaaaccaattagaaccaaaaggagccaattcatgagtgtaattgaacaaactgatcctttttatcagctggccggcgaacatcacaccttttcagaagcaaaacgattggcctcgcaatttgccttatctgatttgccggtcttcataacaggtgaagtcggaaccggaaaaaaacaaatggccagagcgatccaccataaatcccgcagaaacagcgaactatttattaccgttcactgcagccaaagcgaagagcggctcgaatatgaactgttcggcgctgaaggcgcattaaacagggccagccgcggaacattattcttatatgaaatcggagacatgccgctctcggtacaggcccgccttctttccgagctggacgccgggctttccgcccgcatcattgcaagcagcacggcggatcttggcgataccggcgcggaaaatacgttcagccaagatttattttacaggcttcacgtgttatgccttccgctccctgctttatctgaacgaaaaagcgatataccgcttcttttacagcatatgctgacagccacggggcagcatattcatatcgatccgtccgtttatccgctgtttgagcggcacacctttaacggcaacatcagagaacttcaaaatgcggcgtactatatggccgcggcagcatccggcagcacgatttatcccgatgatgtcccgctgtatatcaaaaacagccagaaagcgaaaacagctaagaaaaaagaaaaacggctgacattgatggagaaagaagagtttttgtttattttggaatcaattaaagacttaaatacgaagggcgaatccgccagcagacggagcatatccgaattaagcgaaaacagcacaatgacattatcgccccagcaggtcagaaacaggcttgattacttagaaaagatgaactatgtgacaaaaggccgtggacgcgctggaacaaaaattacattagaagggttgagctttttgcagtcactgcaaaagcaaatcctttaaaaaggaggacatttgattgttcacaataaaagaagaaatcgcaaatgccgtcacacacggaatcggtgtattgctgtcgattccggcgcttatttttctcattatcttcgcggtgaaatacggctcgccgacagacatcgtcagcttttcaatcttcggcgcttcaatgctgctgctgtatctcagctcgactcttttgcacagcattcagcataaaaaaacgaaagacattcttgagattgtggatcattccgcgatatacgtattaatagccggaacatatacgccatttttattaggaccccttaaaggggcgctcggtctgacccttttaattattgtttggtcgcttgccatcggaggcatcgtgtttaaaatctttttcgtgaagcggtttatcattttttcaacgcttgtctatttaatgatgggctggctgatcatcgtcgccattaaaccgctgtacgcttcgctgtcaggccccggtttcggccttcttcttttcggcggcttattgtattccgccggcacaatattttatatttggagaaaggttccgtatcatcacgccatttggcacagttttgttttaggcggcagcgcctcgatgtttttctgtattttattttattgcgtcaaagtcccctttatctgaaataaaaagcacagcctctctatagagactgtgctttttttatgcacggagccgtttctgaccggccggataataagcgggctttatatgtaattcaatgtcagccggtttcagccgtttcagtaatctgccccgcagcagccggtctgttcccgaagtgctgacaggcacaatcgggagatcgaaacgaagggccagttcctccggattgattttgccgtctttggacagaatcaggctttgccctttttgcagacggacttccgcctcctgaaacacggcatcccgactgtctccgtcacaaatgacacccatcagccgcagccaatttccgagaaacggcatccggaaagctttctcgccagcgataaaaccagccggctcttcaagatgtcccgcaagcagcagaagatcagccgggcgcaatctgggatgcacatacaatacggggccgtccggtatcggctgatcatgatgaatgccgattgccgatcccgacacgtcaatgcagcctctcataaaggctttcggccgctcatacaccagcctcatctgtttttgaaaagaaagccgcgggtcaagctctttttgattgatatattcctgaatatttttcatgaacataaatacaacgtacatcacaaggcagccgtaacgaatcaattcttgtccccctgcttaaactcaattctttttctcgtatacaagatactcataatcgtaagggtttttttcatcttttactccctgtttgcgggatgtcaattcccattcagcttcattaaattccggaaaaaaacggtctccttcaaagacatggtgaatttttgtcatgtagagtctgtccgcataaggaaagagcgcactgtacagctgggctccgccgatcacaaagcattcttcatccgccgggatcagcttgagcacttcctcagccgagtcggcggtaatacagcctgggaataaagattcgtcccgtgaggttacaacgatgttacgccggttcggaagcgggcgtccgattgattcaaacgttttccgccccattacaatggtgtgacccgtcgtcacttttttgaaatatgcgagatcatcgggaagatgccaaggcagatcgttatcttttccgatcagccggttttcatccatcgcaaaaataaacgaaatcatacgctgacagctccttttatgtgcggatgcgggtcataatcctcaatgataaagtcttcaaacgtaaaatcaaaaatagaatcaacgtttcgcgcaaaccgcagtttcggcagcggacggacatcccttgtcagctgcaaattcacctgctccacatggttttggtaaatgtggacgtctccgaatgtatgaacaaactcacccggttcaagccccgtcacatgcgcgatcatcattgttaaaagcgcataagacgcaatattaaacggcacgccgagaaagacatccgctgagcgctgataaagctgacacgacagttttccgtccgcgacataaaactgaaacaggcagtggcaaggcggaagcgccatatgatcaatttcgccgacattccaggcgctgacgattaaacgtctggaattcgggtttgtcttgatgtcatgaatcagccgggagatttgatcgatggtctcgccgtccgctccgcgccatgaacgccattgagaaccgtaaaccggtccgagctctccgttttcatccgcccattcgttccagatgcggactccgttatcctgaaggtagcggacattcgtatctccttttaaaaaccaaagcagctcatgcgcgatggatttaaaatggagctttttcgtcgtaagcatcgggaaaccttcctgaaggttaaaccgcatttggtagccgaacgtgctgatcgtacccgttcccgtacggtctccttttttttctccgttttctaacacatgacggcacaaatctttatattgtttcatttttttcatccttttaaagtagtcttttagtagtgtaacacaataaaaaatcatttctgcaaaatttctcagaaatgatttttttatttcttctcgctattacacgctcatccagtcaggcggcgtattgcggtcccagtaaatgctgccgagctcatgatgtgactgaaatccgtcttcagcggtatggtaatgaaaattaaaccagtagccgtcttgcggaggatgatcccggcggacgtggaaccttaaaagatcttcacccgtcagcctgttatacacatgaaaaattttttcagtttttccggccgacggtttgctggaaataaccacatcctgatacgcttcatcatcttgaaacttggctaaatgtcctgtgatcacatcttcgattttcggcagaatttcacttctgtaatcatcttcaatgaccggagagattttgctgccgaattttaaaaatgattgattttcagcatcaccgagaagctgctgctgatacgattgaaacagtaattcaggctcccgccctgccttctcttctcccggcagggcgtgttcatcataaaaagcggtgtaatcattctgctcaagactgctcgactgtcctgaaggcttgtctgtcatcaaagcagccggaggagacacgagtccgaacgttacaatggtaaacagaaccacaagggtctttttcatccacaatttcatgacagattgttcccctctgttttattgtcctcttttcctttattttagcatagatgaaagcgcggcgtcatgtccggcagcgtattatcatgcaatatgggaaattggtaactgtgaccgagcggataaaccgcttacaataagaaggagaaaaaggaggggatgagatgattaacgttttatttgcgacagtatcacttctcacgctgctttattttgtcgttatggaaatcactgattaacgaaaaagaagcccatgatatcatgagctcacatggatgacaccgaagtggaaaagcgccgtctttcttttcagcaccttgaagccgtatcgttcaaaccgcgggcttttccaatggtctttaagcactacgcattttttcgccgcccggacggcttgcgtgatgcactcttcgttaaaaccctcttctgccagcgcgcggagcggtgcaatgccgtctgacgtttcaacaggttcgtgaaacatcgggtcaaaataaatgacatctaccgatgaatcaggaagctcccgcaaataatcggcgcagtcggcatgtttgacctgaatgcgtttcatggcggtttggagctgctccattccggtttcccacgtttgaagtcctgtttcaacaagcaatgagacaagcttgtttttctccaggccgatgacttgtccgctttttccgactgccaggcttgccaaaatcgcatcggatgccagcccgagcgtacaatctaaaaaggaacccccttcgcgtaatccggctgcttttaacaacggctcggcttcccctctcaaaaaccgctttgcgcggaacatcgctgtattcgggtgaaaaaagaacttctccccttgcttcgtgtaaagttcgaaccgttcctttccgatgactaaaagatcgctagccgctcgttccagcattttttcaatgggctgtttattgcggctgcagtaagtgtcacccagcttgacactgagcgactgcgctgtgtgtatcgtatattcgcttggtcggtaactcgttgtgatcatttttttccccaaaaagaaaatgcccggaattcgggcatttcagcagtgcgcatcgaaggcatccgtcagatttttcataatttcctccatgtcatgcccttcgatttcgtgacggggaataaaatgaacgacctcttttccttttaacagcgccattgatggcgaggaaggttcctgccctgtaaagtattcacgcatttttgcagttgcgtctttatcttgaccggcaaatacggtaaccgtatgatcaggcgctttttcatgctgtaaaacagcctgagtcgcagccggacgggcaagaccggctgcacagccgcacacggagttgacaacgaccaatgtcgtgccctctgcctgttccataaagctttctacttcttcagcagtcgttaattcctgaaaacccgcacccgtcagctcatggcgcatcggcacgaccagctggcgcatatattcttcataagccattgacataaaaaagccccctctaaaatccttatatgaagtcaaggatactatagagggggccagaattcaattgttcaggcctctgttttatattttcatgattccgcccgtattggcgcttgttacgagtttggaataccgggctagatatcctgttttcactttcggctcgaagcctttccattcggccttgcgtttttcccattcttcttcaggcacttgtacgtccaaaatccgtttttctatatcaacgatgacatggtcgccgttttctacgaatgcgagcgggccgccttcagccgcttcaggcgatacgtgcccgattgaaaggccccgggacgctcctgaaaaacggccgtctgtaataagcgccactttcgggccaagccccattccgacaatctgagacgtcggagcaagcatctccggcatgcccgggccgccctttggcccttcataacggataatgacaacatctccttcttttactttgcggtttataataccttcaagcgcggcatcctgggaatcaaagacgacagcgggaccttcatgtcttgtaatcccgtcctgtacgccgcctgttttgataatggcgccgtccggagccagattcccaaacaggacggccaaaccgcctttttcggtaaacggattgtcaagcggatgaatcacgtcataatcctttacttcatgacccgcaatggtttctccgagtgtgcggcctgttacagtcagcgcgtcaagatgaagcgccccttcttttttcgccagttcattaagggccgctgagactccgcccgcttcgtgcagatcttcaatgaagacgtccgaggccggcgccaatttcgataagtgaggcactcgttcagccacttcgttaatgcgttctaaagagtactcaaccccagcttcattggcaagcgcaagcgtatgaagcactgtgttggttgagccgccgagagccatgtctaacgcaaatgcattgtcaatcgctttttcggtgacgatatcgcgcggcttaatgtcttttttgatggtctccatcaattgggccgctgattttctcacaaactctcttctctccggtgaagttgctagaattgttccattgcccggaagcgccagaccgagcgcttcagacagacagttcatggagtttgccgtaaacatgcccgaacaagatccgcacgtcgggcagccgaactgttccagctcctgcaggtcgctttcaccgattttcccggcttgatatgcgccgacgccttcaaatactgaagaaagcgaaattttgcggccgtcgcttgtgcggccggctgccatcggccccccgctgacaaaaatggtcggaatattaatccgcatagccgccatcagcattcccggcgtaattttgtcgcagttcggaatgcagaccattccgtcaaaccagtgcgccgagacgaccgtttcaactgaatcggcaatgatttcgcggctcggcagcgaatatctcatcccgatatgccccatcgcgattccgtcatctactccgatcgtgttaaattcaaaaggcacaccgcccgcttccctgattgcttcttttacgatttttccaaattcctgcaggtgaacatgcccgggaacgatatcgatgtatgaattacagaccgcgataaacggcttgccgaagtcttcttcttttacgccggcagcgcgaagaaggctgcggtgcggcgctctgtcaattccctgtgtgatcatgttgctgcgtaattctgccatggtgatccccctactgtttttagactgtgcactatttttaaaattttcagtttatttaagggcgcgttctgcaaattacctgtttacagtgtctttgccctgtctcgcttttctactctttctgtatttcgataaaaaccctccaacaattaatattgtacttactatatagagttttgaatcatttttcaacaatattctaaataatttttataaaaagtgaattcaaataaaaaaggtgcatggcgcacctttttgttataactgttctttttttctgctttcagtcatctgtttccagactgaacctttcgcctcttctccgtgctcaatccgttcaatcgccattttgacttgcaggctgacttcgaattccggatcgtcttccgccgcttttaatgcttccagcgcgctttcatcgccgacttcatataaaaacatggccgcgcgccagcgcacgagcttgcttgagtcactgagcgatttcatcatggccgggatggcgctcgcatcgccgagatccgacaggcagtcacccgccgtccttctgaccgtcaccgttttgtcttcaagcgctttgtataacagcggaagcacagacggcttttcgatcattcccaaataaacgacggcttgtcttctgatcgaagtcttcggatcatgcagcgccttttccaatactggtaaatcgtcttcatccggatccatttgctcaagatgggcatagcgctgtttccagtcttcgtcatcgagcatttccaaagtcactttataagctttccgctgcactgccggtttggcctcacccttttgctgtgcggctgcttctgtcaggcgtttgagccgctcatcactgtaggcggcctgaagctcttctgtgacatcgtgtccgatttcggtaaaatccccgaagcgcacgccttgttctttccaagcccgctcaaatacaacatttgaagcttcggaacgcagctttaagatggcttcttggaaacgttccggaaggccgaagcgctcttcacgttcgccgtccgtcaatttgacctgcatcgggattccgctgaacatttgtacgaaaaccttcacttcaccgaacgattcctgttcagaacggctctcagactgctccgtatgttccattccgaaggcggaacggacttgaggcagaatttccttccagtcaaaacgggcgtttctctccacagccaggaaatcggcaacgtgataaacgccctttactccttcaatgtttaaaatatcacgtacgacagccggagcatcatctgcctgatcgggcttgtaattgttgcttttccctgccggaagctcttcagtcaaaatcactttcatcgtgttcggactcggcgtcggttctattgatttaatcttcatattggtcctcctatgcacaatctgacacttattctaacatagtcggcacaagcgttctattgcgccgcttagcttttgcaaatgccggcctctttttggatacgggcggcgaactgcaaaagaaattgatgccgctcctctgctaaaccggcccccgcttttgtattcattaagcctttaagcttgattaatttatcctctatatgggccagcacacttgtttgagttccgtacatcgggtgacccttcgctccggcaaacataaaagccctgccgatgcccgctgcgccgatcgcatcaagcatatctgcatcctgaacaactttcccctccaatgaaagcggccgctttatcagcagttccctatgtctgaatgacattctcgtgataatatccgtgatctcctgaatggagccagccgcgatgttgaaagcagccagccgttctgtcacttcgcctgccgtcagcctttcgcttttttcgagcttggcgtcaatcagatcatgaaccagcgcggccgtctcagtgataaataagtcggcgccttcttcttttgccatataaacagaaagtgttgcgacccgggaaatatgaagccagtcatgacccgttcgttcattgataagcttttctctgacccaattcctgacgctttccagctgctctttttcgttcaccgtatcacctcttattgggccaaaagcctctgcaccgtatcttcaagctcttttgggttgacgttcggtgaaaaacgcccggtgacttcaccgtttcggtccacgataaacttagtgaaattccatttgaccgcttttgtgccgagcatccccttcgcctgctccgtcagatatgtgaagagaggatgagcgtctgctccattgacatcaactttcgcaaacatcgggaatgtgactccgtagtttttcacacagaactcttgaatttccgcttcgtttccaggttcttggttcatgaattggttgcagggaaatcccaatatttcaagaccttcctcccgatatgtatcatagagctcctgaagctgcttgagctgggatgtgaacccgcatttgcttgctgtattcacaatgatcatcaccttgcctttgtaagccgatagcgtcatgtcttcgcctgttatggtccgtacgtttatatcgtaaattgtcatctgcggccctcctttttacattcttcatttattttacctgttttacactgcaaaacaaacggtaaccgctttttccttccacttaacggaaaacgtttttttcgaggaaccaaacggctctttacccgtcataataaagagccgctccgaatttatgcccatttgccgcttttatccccgtcattattcgttaaatgcggtttattacgccgggatggattgaaaaatggcttaaaaatttctataatgaagaaaattaacggggaataacggaggtggcatgttgcctattaatataccaaatcacctgcccgctaagcaggtgcttgaaagtgaacacatctttgtaatggatgaaagccgggcttttcatcaggatatccggccgcagaagatcgtgattttaaatctgatgccgaaaaaaatccaaacggaaacccagctcctcaggatgcttgggaattcacctttacaagttcactttacgttcttaattccaagcacacatactccaaaaaatacggccaggcagcatctggatgaattttatacggatttttccagcatccgccacaaacggtttgacggaatgattattaccggggctccgattgagcacctgccgtttgaagatgtttcttactgggaagaattgaaggaaatcatggaatggagcaaaacgaatgtcacttcaaccctccatatctgctggggcgctcaagccggtttatactatcattacggcattgagaaagtggagctgccgaaaaaaatcttcggtgtgtttgagcataccgttcttaaaaaacatgagagattggtaagaggatttgacgagctatactatgtgccccactcacggcatacagatattaatacggagcagctgcaatcggcttcggatctggatgtgctcagcgtttcagaggaagcgggggtctgtttaatcgtttcaaaagacgaaaaacagattttcttaacgggtcatccggaatatgataccgatacgctacttcaggagtatgagagagacatagagagaaatctttcaaacgtagaagctcctaagcactattttgcgcccggcgggaaagaacctgttaaccgctggaaagctcatgcaacgttattgtttatgaattggctgaattattacgtatatcaggaaaccccgtatgaatgggattaatttttgttttgagtgatacggtgacaaaaatatgataaaatactcttgattcagtatgcgtataacaaaactttaaaataatggaacatatcaattaaatttagtttaaatatgttgccgcgcttattataaaatgatgcacttgtgttatgtttatctatagacaataactccttacgatgcatgaagcttgcttgttgttgattacattgaggtgaatttacttgaataccaataaaaaagtattaattttgactgcaaattacggaaacgggcatgttcaagtggccaaaacgctctacgaacaatgtctgcgtctcggcttagatgtgacggtttccaatttgtatcaagagtcaaatccgattgtttcagaggttactcaatacctttatttaaaaagcttctcaatcgggaaacagttttatcgtttgttttattacggagttgacaaaatctataataaacgcaaattcaatatttattttaaaatgggaaataaacgtttaggccagctcgtcgaagagcataagccggacattattatcaatacatttccgatgattgtcgtaccggaatacagacggagaaccggaaaagtgatcccgacgttcaacgttatgaccgatttctgccttcacaaaatctgggttcatgaaaatgttgataaatattatgtcgccacagattacgtgaaggaaaaactgattgaaatcggcactcacccgaacaacgtaaagatcacgggcattcccatcaggcctcaattcgaggaatcgatgccgaaagagccgatttataaaaaatacaatctctctcccgacaaaaaagttcttcttattatggcgggagcgcatggtgtgctgaaaaacgtaaaagaactgtgcgaaaatctcgttcatgacgatcaggtgcaggttgtggtggtatgcggcaaaaacagctcgctgaaagaatccctcagcagcttggaaggtgacaatgccgaccggctgaaagtcctgggctatgtagaaagaattgacgagctgttccgtattacggactgtatgatcacgaaaccgggcggcatcacactgacggaagcgacggcgatcggagtacccgttattttgtacaaaccggttcctggacaggaaaaagaaaatgccattttctttgaagatcgcggtgcggctgtcgtggtcaaccgccacgaagaaattttagagtctgtcacctcccttctcgcggatgaggagaagctgaaccggatgaaggacaatattaaaagcctgcacctccctaactcctctgaagtcattttgcaggacattataaaagaatctgaaatgatggccgaaaaggcggatatggcattatcgtaaaagaaaagcacacgaatcgttcgtgtgctttttgtttttttccggttaagctttgtgactggaaaaataaagataaaaaatagggagcggccgcttgacgtccgctcccatatggtgtatagttgaaccatcatttaacaacgtttacatacgtacggttggatgatgacaaaattttttttagcacgaaggtgctacagtactaggaggaattaagcaatatgcaaaacggtaaagtaaaatggttcaataacgaaaaaggattcggcttcattgaagttgaaggcggagacgacgtatttgttcacttcactgctatcgaaggagaaggatacaaatcattagaagaaggacaagaagtttcttttgaaattgtcgaaggtaatcgtggacctcaagcttctaatgttgtaaaactctaaactcaatacatgttgatcagatgacaaatagaggagaggcgtatgcctctcctatttgattgccgtctgaatctcaattgcgacaagattctgcttgcagcgctgctcaatttcttcaatttgtttctccattgacggcattcctttttttgccatttctgccaaacttcccaaatcaccgtatatttctttaaatgtctgctgaaggattgtttttaaatctttatcattcacggctggtttttcccttctctcccaagataccctgaataatagtaaataagccctaattaatcaggttcaatagttatatcggcttattttctatatttttttctattttccgtacatatttctaaaaaaaaatctccaaactatttgcggaggtgttttttaatggactctgaatttttcccaaacggactgacggataaacgccagcttgaattagcggtggaaacggcccagaaaacaacgggagcggctacccggggccaaaattcaactttggtggaatctgcttaccaggcgattcaggatgccagaacgatgtcacaatccagtgaactgcaagctctcgatcaggattttctgcaaaagcagcgaatgcttctcgacgattgccagcatcagctcgatgaattcgaaaaataaaaccgcagaagctgcggttttattttttattgatttgtcagcaccttgccgtaggctttcagcttctcccccaccgtgcattgcttgatgcagaaagaatgagcgtgcgtttttccaaactctttgcggaaatgcttttttacgaaacagtctttgcaatattcatcctgaagctctgtcaattctttataaatgctttttttatccaatatcagtcatctccgttaccttctaatgttatgcggctttcaatctgccggtccgagagaatttttttggcaaggtcatccgcttcttgattttcctttcggtttacggcttcatatgtcggtgtcagctttaaggattcgagcagcgcttcaattttatccagccattcgttttgcgtttcatcataacacggccagctgccgtcaagctgatgcaaaacgacaagggaatcccctcttatcgtgattgaatttctgcttgcgccaagttcctgcacttccttaagcgcttcgtataaagcggcatattccgcctcattgttcgtctgaagcgttaagcttttgtttttccgtatgcggtatcgcttgccgccgagagaataatacatgacaattccgagtccggcgcgtccgcttgttttgtcaaagccgccgtcgaaatacactgtaatgtcgtcaggttcgtgcgcaagctcttcagtaagcttttctaattctttaagcgtccagctcgcgcctttttcatcctcaaaataaatgtcttttatataaggaaagcggctgacttctcttgcaagcatgcgcgctttcggaacggtcagccaatcttcggaaaaaaacgcgacagggcctgttccttttgcttctatttcgatatacggcttaagattcattgaaatcaccttaccattcattagttgacgggcgtgtgctataatcaaaccattctcaaattgaaaggaagtcagcaggttttgtttaacgatgtgttatggatcttatttgcggtcattcattttatcattgttcttctgttttataaaggatttggcaaaacgggcctattcgtatggatcggtttcgccacggtgtgcgccaacttgcaggttgtcaaaacagtcgagctgttcgggcttacggcgacactgggaaatatcatgtacggcaccgttttcttcgcaacggatgtgctgaatgaaaaatacggtcccagggaagcgcgcaaagccgtctggctcgggttttccactctgctcgctttgacatgcgctatgcagggggctcttttatataaaccggctgcgtcagatatcgcacagcctgcccttgagacgattttcggttttctgccgcgtgttgcgctcggaagcctcttggcttttattttcagccaaacgatagatgtttatgtatattcagccattcggagaatctttccttcagacaggcttctctggctcagaaacagcggaagcacggcgctcagccagctgctggatacatttatcttcactgccgtggcctttatcggcgtttattccgcgggcgtatggttcagcatcttcatttcaacttacctgattaaatttgcggtatcactcatttctgtcccttatgcgtatatggcaaaacgaatgacaccgaagggagagtgacggatgatgcccgctgaaatttacgtggacggtgcaagcgccggaaacccgggcccgtccggtatcggtatttttattaaacatgatgggaaaacagaatctttctcaattccgatcggcgaccattcaaatcaggaagctgaatttctcgctttaattgaaggaatgaagctgtgtgccgcccgcggatatgagtccgtgtcattccggacggattcggatatcgtggagcgggccgcagatcttgaagcggttaaaaacaaggctttccagccgtttgttgacgaaatcatccgcttaaaggtccaatttccattatttttcattaagtggattcccggcagacaaaaccaaacagccgatcagctcgcaaaaaaagcgattcggctgaataaataaccggaatgaaattgcgactcactgttcatcctacaaatgaggtgaacagctatgagaaaagaaaataaaggccggctgacggggggcgtgaatcctcagggaaatatggaaggaaatgcgcataaagacccgaaatcagcccttgaaaacaacgcaaaaaaaagcaatacaaaacgctagagggatcagctgatctctctggcgttcagcttttcgagcatcctttcaattccttttatctgatgacgtctgagcattaatgccgcctcttccatctttaatgaaaaaagcgcttcttcaagcgtacagactaacggcacctcgcaatgtatttcagcaagctgccttgacagctccaattctttcaagctttgctgaattttcgtttgctggcccttcggcaagagagcgaggctttctaataagcggtctatgttttgatattcacggatcagcttgtacgccgttttttccccgatccctttaacgccgggatagttatcgctcgtgtctcccatcagcgccttaatgtcaatcagcgcttttggcggaactcccgtttcttctctgaatatctcatctgtatataccttataattgccgatacccttttgcagcagcgctacttgaacttgatgattcagcaattgaagcagatctttatcacccgttacaatcgtaatttccgcttccccggaaaatagggcagaaagcgtaccgatacagtcatccgcctcatagccttttatgccgatgtttaaaaaaccgagctctcgcgctgcttctttcgctagatcaaattgcggaatcagctctagcggcggttcgcttctgttggccttataatcttgaaacaaatcattgcggtacgttttgcttcccatatcccagcagcagacgacatgtgtgggctgaaacgtatcaaccgccgtaataagatgctttaaaaaaccgttgactccgtttgtgggaattccgttttcatttatcataaaattgcgatgaacggccgtcgcgaaaaacgagcggaacaaaagcgccatgccgtcaacgagcagtaatttgttattcatatatcgaaactccttttttattcaatgttcctattttaccaaagaaggcggtaaaaaaacagcatccccccatttggaagatgctgccgtcacgttactcaccgtgtcttttattgcttgccatcagcttttcagcttcacggccggcataagaatcaaatttctgtccgaagccgtttttctttttggcattgttattctgctgagcatttctgtttcccagttttgttctgcccatggtcatatccccctttagagaagatacggatagtatgtacagcaagcgctgatgacacacgcggcaggttcatccattactgtctgctgacgaattctttcaccatctcttcacttacgaatcgtctttgcggcacgatgccctttttcgccagctggttcatttttgcagtgatgccattgatggcatctgtcgtgaacggtttattctgtctgcattttacaatggcttcttcaatggcctgttcacgctcatagtcaagctgtacaaatgttttgacgtgctgatgctgttttgcggaatgtgctgaaattgctttatggacttctgacataaaaggtttcatctcgctttttttcattttagtctaccacgactgttatctgcccgccaaccggatttttaaattttcagcatttcatctttctttttccatgctttttcggcttcgtaaaggtgttcaatttcccttgcactcgtattttccgcgagaccttgtaaataagtgtcccgctgctcgcggatctgggacaggcttttatccgccatgttttcttgcagacggcgcacctgctcagcatatcgctctgaaaggctttctttctcctgctcaagccacttttctgtcactttttgcaggctcagcctgagcccttctacaaacgctgcttttccgttctgttcaaaaaactgcttcggtgatttaacttcctttacgtgatgtgagaatgccgagacgttaatgaccggagcgacctctttcagctgaacggcaaattcgttttcaccgctcacataaatggagaaatctccgtcttccataagcttcttctgacagttttccatccattcctcagtcatatggcgctcaataaaaccggtcatccggatatcgagcgttttcagctcttgaatatattcaaaacggaattccttgatcgcttcattcagcgccgctgatatattttgtttccaatcaccgttttgaagacccggatggaaggcggttttcagcatatcattcgcataaaacgtcaggcggtgtttaatgtgatagagctgttcttccgtatctttcatcacttttcgaatgatgacctcagacgtacggcgctttgaaatgtcagcgagagctttttcataggaagactccagacgctgtttctttttctctttttcttctgccgactggtgaagagattcgtgaagctgttccaccatatcgcacaatttgtccgcctctgttttcagctgggcgcagctggccctcattacatcttcctcaataaagtgctcaagcccggttcttacttcagagaacctgttataaaaagctgcttttttacccgcaagctcttctttacttgagacatgatataatttcggccggttaattccctcttttgagagttctgagcggacatagtctttgacggtttccagctcgctttcggttttggccagatcggcggcgttaatgacaaaaaacattttatccatgccgaatgattctttgacgaggccgagtttcttcagaaaggacctgtctccttttgaaaaagaatgctgatagtacgtcatataaaagaacgcgtcagcatcttttatatattgaaaggcaagctccgtatggcgcttgtttatactgcttgctcccggcgtatcaacaatggtgatgcctttttgcgtgagaggcgaatcataatacacggtgacttcttttacgcagcaggccgttttttcttcggctgcgtacggttttaaaccttcaaccggcaccgtcagtgtcagcctttgacggatctgttcttcatacgcatcaaacgcctgcagcatcgtctgaatcaccgggatgagttcatccggaattttcccctttttaatggcataattccatctctctttcagtgaacgcccctttacgtcagcgtctttcagctcagtcagctgaagcatttcagcatccagttcctcttccgttttaaaaacgatctccgcagatttatgcggtttgccgtcttgcggtttcgttattttgttgatcgtagccgttgtgggcgtcggtgatgacggaagcacgtattcaccgaccagcgcatttgcaaatgatgatttaccggaactgaatccgccgaataacgccaaggtaaactgacggttttcaagccgctcaatcctgcttcgaaaggcttctgcctgttttcctaatatgttcgaggattcaagaatcccggcaagctcatagaaccgatcagtctgctcttttatagggagttccttcatcgcatttttttcgggcttgcttacttcatgctgtacagcctcttttggtttctctttttggacgggcactttcgcaaggcgtttttttcgcgtataccagtcgccgcttcccgtatcacaggtcaattcttcttcccacaaagcgcggacgcgggctgctttttccaaggcattgcgttcttcttttgccgattgcgcgagctcatcccttattttcttttctttttcgagccggtttttcaagttctcaatgagcggtccgttttttgtctgaacataagcggtcagctcctcaatgagttccgctgtctgtcttttggcttcccttctgatcatttcagcgaggtctttcgtataagttaatacgtattcagatgaaaaggccgctccctgcttaagggcctgagcggtgatatcatcagaaagcggtgtgcggtacgcctggattttcttgatcagttcgtccgaatccgcttcataccgcttggccgctttcgtaaatgtgtcgataatatgccaatccgcttccccttccgttctttttttaatatcggcaaaaaattcagcatgccttctttctttttccgaagctgttttcgcttttgaaaagaataatccggttttaaatgagggctgctgtgattcaatataagcagatgcaagctccctcatctcaaagggtgtcagattagcgttttgcaatatgttctgcacgtcttttctgatgtctttctctgctgtttcagcctgttgaacggcttgtttaagctcatcttcaacagaacggacaagtgcttcttgtttgtcaaactgctctccgctgccgtttttatcttcttttacgagcatctctgtatgctctttgactaagtgtgcaacttttctctccgttaaggaccataaatttgtttttgcctgctgtttcagcttccacagatgttttttcagctgttccatgtcgtttaaaggatggtcaggctcagtgacagacgtaaagaaaagcgattctttcggtattcccgcgccttcaagcatgtcttccacctgcctgcggtactcttcaaacttcgtttcagtttcatcatgcctgtcaatttggttgacgatcagaaacaaattcggaatacggtctctgatggagctgagaaacagcatattttcttctgaatgaacgtgattataatgaacgacgtaaaataaagcgtcagcctgatggagaaccgaagcggcagataaaaaatgcgcttcgtccgtcgaatcaattcccggtgtgtcaatgtaggccgcataaggctctgactccttaaagccggcatagacttccaccgtttcaatttgctcaccgtctttacagaattgctgcacttgttctttatcgtaacttcctttaatttctgcataagtcccgtccgtcgtatgaagcacgactttatcttcaccgtgccggatgacaacgaggttggcgcttgtgggaatcgggcttgtcggcagtatgtcttcaccgagcaatgtgtttaataaagaggactttccggccgaataatgcccggtaaacgcgatataaacctcttcatcagccgcttttttcataatggccgcgagctgatcggcccgtttttcatcctgatgatccaaaaattgtgcgtataaggcacccgttctgctgaaaatctccctgttatggcgttcttcttctgtcatgtgtctttacccctttgtgtctgtcgcatcaaatgacgtttttcatttttagaaagctctgaaaaaaacctctcccccattttacacaagaatggctcacttttcttcaggaaacgcaaaaaagccgccgatatcggcagctgataaagaaaaaacacccgcggcaggaaaaaccgcagatgtttaagaagacatcgatttattcgaaactttttttaatacgaaaccaattaaaacactgtatgtacaaacggctgcaaataaaaataacattgtcattttcggcaccaccttgaatgagaatcattttcatatttatatcttatcatgagtgagaatgattttcaatctctattttgcggtgttttcttctagcgctttctcttcggcgcgaatcctcacagtgagcatgcaggcattgagaatcgaaaagagaaacagtgtccaatacgctccgtataacagcggcagaaaaataaattctaagatgacgaccgcgtagttcgggtgcttcatccacctgtacggcccctttctgacaagctccgcatccggcacgacaaggattttcgtattccaataccgccctaatgataatagcgcccaatacctgatcccctgtacaaataaaatgatacatataatggcggcccaccttggagaaagcgttttttgaaacgccgccacctcagctgtaagagagacaaaaaagagcacgtgcatcaggacgagaaagggataatgtccttctccgtattcgactgcgccttgctttttcaccttttgctcattgcgccgggccacgatcatctccgcaatccgctgggccgcaagcagcatgataaacagccaaaacattaagaagcccccttttcccagctgaacagcaaaagctcagacgaaaatcccggcccgagagcgccgatcagccctttttcgttttctttctgccgtccgttgagcaactgttcttttatcacatgaaaaatagttgcggaagacatgttcccgtgtttttgcagcaccttccgagatgccgcaagctgcccggtgcccattgaaagactcgttaaataggcgtcaatgacctttttcccgcctggatgggcaagaaaggttttaatgtcgtgagtactgacaccatattcaaataaaaattcatcaacattgtccttcagccactgtgaaaccagggtgggaatgtctcttgaaaaaatgacttgaaaaccgctgtcggtgaattcccagcccatcacatcttccgcatccggcatcatcaccgattgagtggcgaatatccgcggaagaagcggctgtttgacgtcgtttcggttcgccttttctcctcccattagtactgcggcaatcccgtccgcaaacagggaagttccgattaagttgctttttgacttgtcgttcggctgaaacgttaagctgcagagttcagccgcgatgacaagcacgtatgcttcaggatacgcgcggcagtattcgtacgccctggacaggccggccgctccgcccgcgcatcctaagccccagatcggtatccgttttgttttcgcagaaaacggaagctgattcatcactttcgcttcaatgctgggtgtcgaaagcccggtgctggaaataaaaaagatcgcatccactttttcatatggaaagggatttgttaaacaatccgggtttgttaaacaatcaagtgccgcatccgcactgtgcttgacggtttcttccgtatacagccggtttttttctgaaaaaccccgtgccgttttataccattcaatcggccggacaaactgccttgattcaatttcgccgttttgaaaggcttttaacagccgatcaatatccttaaatgaatcggcaaacatccctctcgcaaaatccgccgccgtttcttgcgagacatgatacttcggaatgctcgttccgacagataacacatatgccatgcccatcacctctttacataaaggtttccgcttttttcctgaatgtatgcataagtttgaatcgaggatttcactgacatgccattttaataggaaattggcccttttgaataagaaaccgttcggctatacttgatccattcataaaaaaggttgtgattgggatgctgacacctgtcattcttaaagggtcactcgttcagttagagctgctgacgattgatcactctcaggcactttgcgaagcagcttcagaaaataggacgacttatgcttacacccatgtccctgacggaatcgaagaaacaaagcgttatattgagcgtgcgctttccgattatgaaaaaggacttgtattgccttttgcagtacggagtcttgaaacagaccgaatcgtcggaagcacgcggtttatggatgcggaagtgtttacgcggacggcggacgcagctccggaagtgtgtgagatcggcagcacatggtatgcctctgccgtgcagcggaccggtgtcaatacggaatgtaaacttctgatgctgacgcatgcgtttgacgtgtggcaagctgtcagggtgacgctgaaaaccgacgttcgcaatcagcgctcacgtaccgcaattttacggatcggagcccaatttgaagggacccgccgcgcacacattccggctgtcgacggcggcctcagagatactgcctactactccatccttcgggaggaatggccttatatccggcaaaacctttctggccggctcgcagcatataactgaaaaacctgccgatatacggcaggttttttcacatattcggatcatatacgtataaattgagatcgatccgtccgtctgacgtgaccgctaccccctcagcttcaagagacagcttctgtacagaaaacatctcttcgtctctcaatccgatttcgccctttgcattgatgaccctgtgccaaggaagacgatgctttttactcatggagtgaagaatcctcacaacctgcctcgctccccgcggacttcccgcaagaccggcaatttgaccatacgtcatcacttttccttcaggtatctgtttgataatggctaccgcccgttccgtaaatgtcatgcaactccccatttcgcaagagcagatgatttttgagaaaatcagccacttcctgatcttatatttatagatgatagttgcttcatcatcatacttatttcatctctgcgtttaaatagattatctgtttgttcacaaaaaattaacaaagataagcatgtacttatttaacataatatgtaataatacaattgtattaaaaaaagaaaaggagtgtttacaatgaaaatgaagaaagctttagccggctcagccctatcactcgctttactctgttctgccgcccctgcttttgccgcaggtcctgctgatacaccttctgcagaaagtaaaacgaaggaagtatctgctttggcgacgttcatacttaatggttccggacctgattatcctacttcaatttaccggaatggaatcacctattatttagacaacatcaccttccatggtgctgatggcacttggacagccgtctacaaaagctgatttttcatgacgcggaatgtttgttctaagcaacaactaaaaataatccgtatgttaccgtgccgataagagaataaatgattgctaacatgtacctaagaagtgtcaaaattgaaaattgtgacagattctgaattatctcttgctctacttgtatcgtaatctcctgcttttgcaacttctggaggatatgaacaattggtatctaaaagaagtttctttccggaacggaatctggtatgggaatgatgagcactgttactaatatgaagggggctttgcccctttttctagtttcactgccttttataattgatccaacatatagcacctaggtgcgtaatttcatttcacccgatgatcattatcagttgtactgttttctgcttttagacgcaaaaacacataatctaaaattctctcctgccataggttttttgatcggatcctgcagcactttagtgaatcacatgtctatccaaaagccgagcctcaactctttacgaagaatcaatccagatccttcagaacatttctatggacgcttgagttccccagctcatgttaaggtaactctattcttgatatatgctgacgtaaacaaaaggccatggaatgtttttcctcccctctttagttatcaaaccttcttttggacgaggggcgcaggacatccccgatcagaaaaacacctgaaaaataagggcaataatttttcgtgagcaagtacctcataaaacctcttacttgctcttttatttttgataggacacaacccagggtgataacatgagatttgcttgggaagaattaattataattgtattcggaatgatcttactgagaatttcagggagaaaatccattgcacaaatgaccattgcacagacactggtgatgatttcaatcggtacgattatcgttcaccccattttagaaaccagtttattgaaaacattaatcgctgcgtctatcctttttagcgctttgattttgatggaatggtttcaagtaaaagtaaactggattgaatctttttaaccggaaaatctaaattcgttatagaagacggccaactcaatatagaaaacttaaagaagctgagactgacagcagatcaactcgaaatgcgtttaagacttcttggcatttcaaacataaacacaattaaatatgccactttagaagctaatggacaattaggctacgaattaaaagatgactgtaagcctttaaccatcaaagatattaaaaatgtgatcgatccaaaattccttaacaaagagtctcagcctcaaaaagatgatcaagccaatctattcgaggaaatcaaaaaacaccagactcagcacaagccaaaaaatcttgaataattcgctgattagtaaagccttttgttattcaaaaccgaaaccgaatcagaccgttaaccgccattttttaccgaaaccggtttacaagaaacaaaaaaagcatctgaagcagatgcctttttcaatatatattgcgacgatgaaaagagtcggcaacccccgtattttccgaagaggtccttgtatgcgcctgaatttcagccgcctatccctaccgccggccttagccataatgttaatcagtttgtttttataaaatcattgattaattgatcagtcgttaatattgtggcaaattcatcatgcaacgtggccagagatatattatgaatagtctctgcatcataatatgtatcattttggtctctcatttcgaaggctgctgttgcatctgaaatgaggtatgtatcaaatcctaaattaccgctcatccttgtggttgttgaaacacagtgcggcgtagtcaagccagtgattacgacagttgttatatcatttgcttttaaaagctcttctagattagtcccaataaagctgctgtttactttcttggttataatgacttctttatccataggtttaacgatttcctttatagcaaccccctcattttttggataaaataaagaaccaggtttatcagaaatatgttgtatgtatatgactgtccatcctttttctctccataatttcagtattttgctgatattttcttccgcctttacgttatttcggtctccccactttttatcatcaaaggctttttgtacatccacaatgattaaagcttttttcttttctgccatcagataacctcctatattgaaaatccgtatttataacattttaaataaagattttacttttgtacaattgtttcagtgttaaatttcatatcgcaccttccccgttggaaaagcgctggaatagctaaagcaagcactgactcaaaggctgcatctcaccagaagccagcaatattcaactctttttctctatatacttatcaatattctgaaataagccgcaacagtgaatgaaaggattgcccctaactacattcacgctcacaaaatattaacaaaaaaacccttggttatttttgcattgtatgtaataatacaagtgtattaaaaaaaggagtgtttaaaatgaaattaaaaaaagttttaactggttctgccttgtctctcgctttactcgtttccgctgcccctgcttttgcatctagccctggtcatacaaatagcgactcaactcaaacaaaaatttcgacacaagcgaccaaagattcttttacaatggattaccttcatagatgggatatcccaaatacaactgttaagaatggtgttacatattaccttaagaaagtagagataatcgaagggttctatcgcgcaacttttgaaggatggattaattaaaagaaggggctttcccttcttttcactctcatttgtaaggatccgtgcacaagatactcgttcacgtacatatagtccaggacggtttttcggcgaaataaggcggatgcctcatcactcaatttgtttcttttcaaacaatgaaactaataaaaaaagagaatgcctcgcaaaaagttcatcaactttcggaagcatcctcgatctggataaaataagatgttattttaaagaaaaacggataactaaccctcttgaacccttgtcacatcaagggtttttttcgttttaggaatcatattataaataagttgttcacttaccgcacactttcataacgtgttatttccctttaaattcaagcttttgagcactttctaagcagaaacaaattcacgcattttcatccttggatgtgatttttgttatttttgtgttatttttttcgaaatataaatcattaatcatcatacggccgatacttcttccgaccagcttccagttcttttttttgtgcctcaacatggctcagaagaaataaactcactgttcctactttcttaaccggattcaatttcccagaactcacaagagcgcttaaacgctgtctcgtgacaccgagcaattctccggtttccgctgcagtcagtacttctttttgaatgaactgtatcttttcattttctgtcatgtctgttctctctccaaatcagaataaaaccttttagtatggtgacgatcgcagccatatataagatgacaactgcaatcttccccaatgttccagctgtttcaaaatcaattgcaacaatacccactaatataataaacaacgtcgtcatatctaatgtattgtagtgctttaaatattttttcatatcatcgtggacgtgatataatgtaggagcaaggggattactccccttgtcttactatgttttagcgcttcttgcttgtccggcgggagcgcttttttctgttcttctctcgcttctcgctttccttctgccaaatatcataaatatttttgacaatggttacgattccagcgatgataagaactatgtttctgatctcgtccactttagcacctcctttcgatacttttattataccaaacctatttacaacagtcaataggtttacgtgaaataatctcctttattgaaaattttttattcatatctccgcaaaataaaaatatagataaacatcctcaattcctttaaaatggaatcatcgtttaaatctaggaggaagttatgtctttattttattcactatttgcagccctaatgatagttggaatattcatagggttgtgtctgcttgttttaaagtctactagaaaatttggaattcaacttacgattggatgtttgtcaatcctgcttctaatgtctcttgcaaacagattcatttttaaatttggagatgaacatgaagcagctataactccacaaacatttcataaaattaaagaaggcatgacttatgaggaagttaagaaaatagttggcgggaaagctagatcagaaagcaatttatatgcaggttctaaagaatacgtttattcagggaaagatgggttagaaagtggatcaacagttactctggaatttgacgatgatgaattaaattttatatctgaaacaggcttaattagtaagcgagaagatgaacagaatgaagatgaggatacgactactgttatagaaaatgaaacagaagaagatcaaatcaatgatttagttgaaaacaatttaaaaaacgtctctatcgataaaattgaattgaatcaagatatgagtaaaaataaagaaaagcaatacatagcattagttcatttgtcattcaatctgaaaaatactcccgaaagagcaaaaaaaataacgcagacgtatagcgaagatctagctgctcgaataggcgacaaagtaaaaagtgttgaccaactgatcatattttggaaaatcccctacttaaatgacaatgccgtcctcgcaaaaaattcatatgtaagatctggaagccatttcattattgccgatcaagcataccaaccacctttgcaaaaaataaactaaagatatgtgttttcaatgatcaaccttaaagagtctcatacaacaaacagccccttcatctgatagaaggagctgtttttttattcattcaacaaggcaaaccatgctttctggtaaactttctgaccaaatcctttaaatatagactttgtgctcttagacaaacgctttcttgtcttttcttcagacatgatttttattaccctttctgccaaatcattttgggttttaacaagataaccatttttctcgttctgtatcatatctttagggccgtatttaatatcatatgatgctactggtgtacctgcagctaagctttcaagaatggttagtccaaatccttcagattttgaagtaagtatggaacaagctgctttttgataaacctcaattttgttgtctgtaaacccttttaattcaatattttttgttaagtttaatttttcaattagttcttgaaagtatgtttcatgctcacccacaccataaatttcgtatttcgcatctggaataacatcaactacttttttgaatgcctttatagcttcctctagacccttttctttatgatatcgggacaaagttaccgctaggtgcggattaaccttagaattatccttctcagtgtcaggtttacttattccatgtggaataacgcgataattcaaccgctctccaaactcgtttgaaaagtcatttttttgttcctcagtcaaaaacacaatctgatcaaatttatcagggttcttgaataaagcattatattgttgacttaattcaaattcacccttctcatttaaatcgtaatgattagtgtgcaacacaacaacttttctcacatcagataatcttttatccaataataaactgaaatttttagggttgtcagacatgatgattggtgattcaatctcttttgttcgattagctatccaatatgccgccaggtcttctaggttcttaaattctaaaggctcgggatagaaaagattgcagcggaatatctcttcgtctttaggctttaaccatgttgtgagataacatttcccatcctttccgaaataacgatctaactttggtttgttgctgaacaaatccatttggcgttcacgtactaaataaccatcctcgttatattcttctctgcgaagcctgtgtctagcttcattcatgtaatcaatatatgcaagccgtccattgttatcgaactttttgtactttacatacagaccatctttgaagtaacgaaaagcattgtttgctttaaaaacgatgaagccttcttcttctttattcggattcccttttatacgatgatcttctttactgttcttagaaggatctagatcattgaataaattataaaccttcactctttcatccagttcattggtattataaagattttgaatgatacttctatgattcttttgaaaaagaatggttagaaattgagtttctttatactctgaaacgagtgtattcgctctatgtattgttgctttggtcataccgcctctttttgtatttaaggaattaaacaaaaaaaccggactaacgagagacatattttatccccttttcatattttttcactagattatattactataaatgaaattttaatgaaatagtcatataaaaagagaataattacaggaaaaccctccttatattaagaaggggtcttttcaaaacttaagtctggtttacgacctataaataccgtcagaaattaagccattcatcatctaaaattcttactgcatgttctggctttgtaatgaaaggccatcagcaaggtactgagttgttttttatgtaatcaaacaagaccttcgaaagttcttaactttcactatatttagagttatgttagaatgaaataggaacatacgttctacatttgttgagattagttactgtattgtggaggattgatggtttgaaaacaattttactgtctgatggacgagccttaaaattaacgtttgaagaaacgagaaaacattttctgccgatgataaaaaaaacaataaaacaaactaataataaatttgtttttaactttattgatgaggaagatttttctcaagagttagaaattgaactttggagagcatatgaaggttatgatttcaattatggaacgtgtttctcaacatatctacattacaaattgaaaaagggagtacgtaatgtaacatattctagatacactttaaaaaataaaaataaagggattttatctatagataccctagtaaataacaaagaccttaaactgattgacatattgccaacaattgattattcactgagcaatcttgaatcaaatgaacttgttagaattcttctagagaatacacctccacaagatagagacgcacttcaagtaatacttgacagagagactttttctgtttcaaaatatgcagcaaaacatcaaatttctcgtcaagccgctaaccaaagaattattaaacttcgaaaacaccttcaaaatataatttctgaaaaatatctccttacaaacgattgagctaactatttgcaatccaaagatcattaattatttaatgatcttttatttttctctttcttttcatcgttttccttagtctattccaaattctctaagctgtaagatacataatcaatacacggaattttaattttaaatttacatttttaaattgcgggatagaatagtagcactcaagaaactaaataaggagaggagcttttttatgactatttgtattaacaaaaaagggtcaagcgttccggtctactcaaattacggattaactacatggggatctaaagtcggaacagttaattctaatgaattatttgttttttatgggacgtttacagaagcaaatggtgcagtttcaatcggtttttattcaccttcaggatggcgacaaggatacgtcaaaccaagtgctgccactagttcatttttgacaaacgcttataaagcgaaatacggaacatctgcccatggaggaattgcatttaaagtccttcatcgccaatctcgtattttttctggcaccaacgttattactacagtaaaaccaggcggtaagattatcactgatggttattcatcttctggatcatcttatccataccgattaagtattaaaggatatattcatgctggaagcaccaaataccataaagtaacgaatggctggtgtgacactgatttagaaatcgggaaatcaatgtacaatacagttacaatcgacggtaagtgggtatgaaaaagaaaaagctaatacactaatcaatataaaaagaggcataaaaattctaacttatgcctcttttttatatcttaatctaatttagatcctctgctaatctcgttatcccctcgttttatatttatattggcctctaaacaattggatgttcataataatcactacatataacctcccaaaaattctttctgctacttcaataatgcttcaagtttcgcctttgtatctggtccgtaaatgccgtcttgacgaagcccatacattgactggaaacgtttcactgcattcgccgtcttcggtccatacgcaccatcaataccaaaattttttgcgtttttatccggataataatgaagagccgctaacgcagtctggatctgttttacagattccccgcgggttaacgggtttgtgactttaaaaatacccgcaggcaggctgaattttgatttttgagtggttttaggctttgaggcttttaccttctttttgccgccgcttttcagctcgttatcgcttttgatataggagacattcacatatccatggaatgtctggcctttagaattggtgtattcaacatatccccatccgttgacagttgatccaagctgatattttacaatcgtgccattcggcaggttaagcaccatggaagaagaggcgctccgttgtgtacgtaaaacaaggccgtcacttgaaaccaccgtgtttttgatgaatcttcctgtatctgtatgggtaacatctggatttgataccgcaggcaccgttacaacctcgccggccattctctttttaacacgggtcttaaaatcggcaaaccctttagagttgcttacccatggggcaggacagattttgtgtgtaatgtcatagtgccgcacgatgtcattgatcggatcaagtttaaacttcttgcatagctcagcacaaacttgttctgcgcgggcaatggtatcaggatggaaagtgccgttcttttcaatgcaaagctccacgccgatagataagaaatttgcattcggtttcagcgccgcgacaccccggtaaggctgcccgttaacaatctgttggacatcattagcatgataagccacctcattcaacggaatgatacaaatagcctctgtacgatcgacaaagatatgtgcagatgcaaatgtctgtttcttctcagacagatttctgttctggacggggagcgtttgaccaaagtatctataatggttggcagcaggcgcaccggggtttgccgtgtaatgcaccaccagtttcttcacgccgttgtttttgattcccggccgcgtccatttgttaatatcaatatattggtttctgtatgctgacataaaaatctctcctattctgttttgaattcaaaaaagcagccggattaaccagctgcctgatcgtctttttcttttgtctgatcgttatcgctttcaattacgtgaagccggtcagtgatgacggccgggattttaacgccgatctgcgccaaattctccgtaatggacagcccttcgtttgcgatataaaaaagaacggttccaaaggtcagaacaccgttcaaatttgttatcgtatcaataatgttggcgacgatgaccaccataaaactgagcatcttccgcacatatccaaaccatgcactgcggctccggagctgcttcattttccatgcttttataatgccagtgataacatccaagatgctgaggatcaaaagtaaatcaaggtatttcacctccccgaatagatatgttcttgcgatctgtaagctttcaaaattcaacatcacttgtattccctccattgttaatcacctccttcgaggcaaaataaaaacacctctagggtgtttattagctccctgtcccgcccacatccacactgattggctgttctgtagcgggataggttaaaccagtgatttgtttatattgctcttcagtaattctgttcaattcaacaaaacgggcgacattcgcgtttgtataataattccggccccagccataaatggtcttgatatttgtaaaccaatccattatgcttttcctccctctgccaacataagaagcaagtcagccaatatttttgactgttcctcggctgcgctttgagcttctgccaactgctccataatgacagcattctgctgttttaaaatatcaacagccgttggtccttgaacattttttgcgtgctctaatatagaattcttttcttctcgtgtagccgattctatccatacctgtttgctaggatcgaatttcgccttaaaaaatgacggtggttgaattagcgtgcaattttcaggaataatataatttccttgctcatctacttcgctaataatagaaggtccgataaaaataaaatcttctccatacttgtatgcttgaatcatgttgcagttcctcctgtttgtagcggcacagatacatctatataaaaaccatctaatctatttgaatcaagtggcgttggatatttaatctttaagtcaccatcatcgtatacaatcaaatttgccgttcccccggttccgcttagagcaaccgaaacgacagcccctcctatcggcgtgtactcaactggtattgacccaaaaataatttcagcatctacccttacgtgacctcttaataacaacaaagaacccgattttgcatatattggcgtgcgtgtccccacggtagcaccgtttttcagcgtaatattttgccacacaggattttcaaaatcattatttgtaataatccgtttccaccctttaaaaacgccgtcagtatgaaccgtggtatgccacaaagtgttatcatggctacgccaagctatgatggactttctcccggaatcgccttcgataacatcatagttgaaccaagaactatcatttacaacaggattgtttttaactgatgtgccattcgcataataataacctgaacttaacgctagaacgtctgtctcatttactaattgtgttcgttttccgtcatcctttgtcaacttcgtcatctggccgccattccacttgtctttttcagtttttgttacgtgaatgtccgttttatcggcatgaatatcgacttttgactgcgcgccttccactgactcaaactcacgccatgacgtccaagaatccgagcctgagattttattacgcataaactttcggcggcctgacgacgttgaatcgctgctgctataggacgtatattcctgatatgcatacgttccgtagttgtggacgaatagatacccgttattattcacgggcgcatttaatgctgtcgtgacactgctcacatagtataagcctgtatccgttaccgtattgaaatcagcaccgcttagatacttcgccagcccattatcttccgttaatttaaagagctgtcctgcattccatttatccttttcaatttttgatgtatgtctttctccgttgttatcgtgttgtcgaaaagcatagtaatcagcctgtttgatattatcgactttatcaagtccaacttgtgccgcagtaaccttgtgcggatttgaagtgtcagaggtgtgtttgtcaaaatcctctttccttgcttgtacgtcatttgttacggcagatagccctatctgcgcttttgttactccatgtgggttacttttatcctttgaatgcttatcaagattcacctgaacagcgtcagccttttcttgcgagccctttttcgtttcaacagcttcaagatcggcaaatttctcccgtaattcctcaacggtttgactgatttcttcaacggtttggtttaccccgtctctcagcgtttcaaagtcgtcaatgtagtagtcagctgtcggaacgatgttctgatcttctaacgttttagcgatagaaaaggtgaaaaatgaagttaccagggattgtccgtttgtataatatagtttgatttcggccttaacggttccgtaatgcttcagttcctcatcagacaaaatgtattcagctgtaccattgactttgtctataagcgtaagactctttttataaaatgatccgtcagcatatagcagaacgatttttgcatccaatgctgacaaaggcaacggtacgccatccttcacaaaagaaaaggacagcttggcgctgcccgtatcttgcgtcataaattgtatgttagtggttcggccgtttgaccgtccggcattaatatcgaatgacacgctccccgttttatacatctttgatccctcccttaatgctgcggcgtaactagcatctgcgctaccccgtaaccttttttcacatcgaacggaattttgattttcataacagttccgtatccggcgctttccgcctttgttgcaacgccattgatggcagaaacactatcgccgactgttactgtttcgtcgatcctaacgaagacttgaccgatcaaaccgattacatgccactcgtccctttcctctcttggtttgtattccgcttcaggcttataattcggattttcaacagggatctgaagaatttcatttccatcattcacctcacgataaaccagtccgccaaattcatcgcggagataacgatcattccaataaaacgatgctccaccgagcacaacgccggctgtttttgaaacaacgccaagaatcttgtcccctacatgagctttacgaatcttatcgccttctaacgcaacaagataagatgcctcaatctttgagccgtcggcagattcaaaatactccgctaagtcctttaaattagacacactttcaatagcgcctgtagctcgaacagtcccatttttagcattaagttcaatctttttattcgcttctgatgcgctgccatcaccgtgccccatcgcaagggaataagatttactattctttgtagcctttgaaaacataacacccgaagaagctccgtctccggtcgtatgcgaatcgtacgaaaacattacaccatttcgtgatccttctgtagatgctccacctgcgttaccagcaatcagatttcgctcaccctttgcaattgttgatccggtatttgcaatgatagcactgtaattcgtaagtggatgcccggaagatgttgctgcgcggaaaccacctttgacgttattaggaacgacagagtgcttttggtcacctaatactgccgcatttctatagccataagcccttactgcaaggatgttcgtttgagtattcggcgatgtaatgccagctataccattcgagccgtgcagtaaaccattaactaaatttacattgtatacgccgcctcctattccgatcccattaggtgctgattcatggcttacaaaatcggaaatgaagacatcatctgttcgttgatcaccgccaacaatccgaatgtcatactcagcagttttaaatccagttacttgaagattggtaacgtttatctttcgacttttatattgaaatgcaataactgaatctcctttatagtcgtatgtcggatccccaatcgctgtaaaaccaatgattttcactctctgatatgccgaaacaactagcgcctttggagctagtccttcataaagcgaattgaaccttggttctcttgacgtgcagtctactaacgtcacatcacgtgcagtctcactccacggatccgtcgctaaatgatgcccaatgtgtcgcaaatcaaatgatcggacgtcccgaaaggattcatgacctcgaatatggacgttacaaggtgccggccattctgcatgggccttaacttctaccccgcggacgttaccttcagtatagttatcaatcacccatatatgcttagaaccatcatctacttcaataccgtttgaattggccccgcctttacgatgtgccttcccggtagggtttgtcataacattatgtgtaatgaaaacgtattcgctgtagtgtgtggtaatgccatcgtcaccataaccagagccaacacagcggtcaatccaaatatacttactgccagttgcggtataatttttagcagttatatcatatgtcggtgcagttatatcgaagcaatgcaaccccggattaacaccctcaatttcacggataatgccgaacttgacttgcgcaaatgtcaagcagcttgaatgtatcccgccagtcgctcctacaccgccttgtcgttccggattccaatcaagagacataccttcaacaacaatattccggttgcctaacgtatgatcagcatttgtaacaacccactcgctggcgggtgtatcctcatggagcttaagtgtagtgacacccataccttgaccaatcatatatgtccaagacggaagtttgactcctttaacaacatatgtgccggctgatagcatgaggcgaaccttaccagtaccaattgcccttttaaacgcttctgaactatcggtttctccggttggatcagcaccgaagtcatctacattgacggttcgtttaatcttttggagaagcttattatactctttatccagccgctccttgagcaatggagttatatttccttcagcatcaacccgcgcatccacaacttcttttacatttgttccatcagcatttaaaatcaggttgcgtatccggttatatagaccatcgatatatgagcgtaaagaaaagccgccatggtcaatttgctccgacgagtgggctttattgctctttttatggctgtttatctcgttttcaagactattcaatccgttttcaacggtctcagcatctgctctttgttcagcaatataccttgcgtttctagcagtgtcataatccttgattaacttgaatcccaatgtgtcactctcctttcaagacaaaataaaaaacactcttaaaaagagcgcttctaaatcatcattctcagtttttgtacataacgcttttgatcttttaatcgcttttcttgctccatccggatatcctgaatatctttacggaaattagcaaagttcaatgttggctttgcatatggatttaagggcttatattgaatggaaagcagccggacgtcgtcttcataggttacgccataaactgtatcagccaacacatgaagagtgtctcctttccaaaaatcatcttgtatgtcaagaagcttcggctcatagatgtattcataatccacctcgatctccattttcgggtaaggattcacgtattttttaagcgccgccatcatactggactcttttttatagcgctcgtcgcgcagtggctcagcccaccgcggcatgccatcaagcaggaacttattttcgtcagggtgcttgtaaaggaccggctcaaagacgtactctgtttttttgctgttggtgccgctgttttcctttattgctccgtatccccgtgctcgggtagagcagccgtctgtcgatgttttaattttaatgccgggcatattataacgagagtccagagtgtgattgatacgctttcccatctttttatagatgtaaatcttgtaattatctacatccagttctaaaccgtagtcttccacaatttcgcttatcagctcattcgcaaacttgtcaccaaaattctcctgctctacactttcaaattcactttccttgtctttgaaaatataagagaatttcgtccccttcaatgtgaaatcaagcatttttcgtacagtcagtgtaccgctgatcgtctcttctacataatggttattcaaaacagcaacgaaaacatggcttgcagaaactttcttgctgagtgtcttttcctgatcgacttcgatcatcgtgataaagtatttttgatggttaaatttcttttcatccaggtaaagaatattgtcatttatgagcaaatcatattcaatgccattatcagcagttcgagtgatcgtaaactcaatatctttttttccggtggtgtcatctagcagatctggatcggcaccaatgacttcgaccacttgatttccgtcttgactggaaacatgcagttgagggaaataaacgtctttcggcaaattttgattcagcgtaatgtctttaccatcatattctttacttggtatgtctggctcaggatctggtgtactcggattactcggttcgtctggtactccctcggttgtatcatatttcgttaatttataggtgaaaatgaggctgttcaattttgttgcgtaatttgggtcggtagcatacccggctttgacgagagccgcagttgctttctgatagtctgtttccccgacgacagctttataatggtttttgtcccagctaaggccatttaagtacaggttcgtcaggtcttgtatagattctttccatgaagggtacttcctgaatttagccggaacttgtacgttttctccgttgataacttcccatgtttgcatgatgacatattggccgttgtattcgcccttcataccgaaaaggttatgtccttttgtcgccaattcacttgtgccccaagcgctttctaagcatccttgcgcaatgatcagtgatgcgagaatacggtgctttttatatatttgctgggcgtcgccggcaatctctttaataaaatctgtattcgccatataaaccgcctgccttacaagtagtagaaccgtgtgtcaaattctatgacaaaatcatcggcattttgaatttcaaactcattccagccaatttcgagattcggcagacgtccagatgtttttattggtttattattgagcagcgcgtactgctttaaaaatgatacctgctgtgacttcttcaactcctgttcaatcgttaatttctcgccattagtatgattgattagcgttacattcttccccttggccttcaataggacgttatacgcgtgatctagtggattgatttggacatctccggaattaaagacagagaaacgtttctgattcttaaaataataggccaggttgtcatctgattgcaggttcataccaatgttccagttctctcctgactgattctgcgctgttttggttgaacgcttagattctgccattccggtaatattggtaaactcgacagaaaaaacagcatgtgttttctccttttctttggaaatgctgaaattcccatcacacataacaaggaaacggcgattcggccataagtcagtagaaatataataggcaaatggcttcaccaataaagcatagagctgatgcctaagcatataaaaattgttgtgaatttttgaattcatatatacttctacagtgacttttcttgatgaataggtcacatcacgtggatgctgtgctgagataacaccatgacgccgcgggatcgtgattgtttcccgattgatagccggcgcttctgccaaaaaactcaacacttcaaattgagggagcaagctgtcaaggctctgctcccccaatccgttatcaaaatccaaaaatagttttaccaagcaggcttacccccatttctatattgttttcttctatatcggtcagcgctcgtttggtctactcgggccccgtcaatataagtgttgttatcttttaagaccaactgttgcagtagctgaatgttctgctggagagcgtcaatctgctgccccatcatgctgatttgcctttcttgattctccacgacccgagtcatatcgatattgacacttctatcattttcaggctgtgctgcggatgctttttgaagcaatagcaaagccttcgagatcatcccttcttgcagagaaggcaggacgccaagctcacgcccaacccgcgcccacaatccgatattcctttcgcggtatgccggatctttcgtaatggtggtttcatcgtaccctcgttcgttgaggacggcgagcttggagccgccgcgccccggagaagtaccgccctttgcataccctacgtacgggccgccgcgcgccattgatttcaagccgggatgatttgatatatctccatatcgccctttgatgtaattaatggccgccagaatgttgtccaccggattaagtatgttgttatgatccggaaatgcgttagaggaaaacgtactcggaatggtctgcattaacccccttgacgggtttcctgctctagcattggaatctgtaaggttaatggcattcggatttcctcctgactctttcatggcaatcgtgattaagccgggaacccatgaaaacgggacaccagcgatgccgatggcttccgttacccatttttgcacctgagcagaccctgttgcgcctttgtaggcatcggccgtaaaaaatcccacatccggcaagaccccttttaagaattgaagggcaccgctttttagcgttttgagaataccagtccctaatccatctataccggttcctgttttaaacgggatcatgcctttgaaaatgctgctgattatcttttgcggtcctttgataatcatatccataacgtcagaggcgacgtccttcgttttgccaatgacattcttgccgacagagacagcgcctttcaccagctttttcgacccctcaaacgcatttttgaagaagtttccgaccccatttgcataaccgggaagccctgtggcggctgcttctttcgactgagcgtgcggaagaacagacgtaccacgcggaagatcccacacttgcgggccgcccattccgacaatgtaagtgccgatgccaggcgtgtgagcaagctcccacccttcttccccgactaatgcccggccgccggggtgaaagtctgttcctttggcataggctactcccggtgcaatttgcatagaggaaggctgacggttatcgtatcccgcaggcttccactctgggatagtatccatgtgcataaattctaaaatgttattgatccagccagtaacagcattaactctctcagccaagtctactttaaatagatcccatacaccgagtacctctccagtttctgtattaacctcgctaatatgcccagcagcttgtttttttgcctcttctacgacacctttatgagtttcttttgcttctttaattgtctttttagcctgactccttgcattttcaacggttttatcgtgttcttcttgagaaattgacccttttacataacgttgctcatccgcggcatcaataacggcatcacgttgtttcttagctgctttaattgttctctcttttgccttgttactgtcttttataacagcagccgcttgtttagcagaaagattagacgtctcttcttttaactttgtagatatctttatctgctcagccttgcttcgtgagagcgcagtctccatttcagagagcattgcaatttggatttttgctatttctttattctctttttccgtggtttttcgattttcgcgggcggcagtcttataaatttcatctactcgatcaacatacttttggatcttcttttgttttttctcgttataagcatcaattttgccaatgattttattttcttctttatcagacattccgttattagaagcataaaattctttcagcactttagttgcattggtcgcgctggttttgtatccgtttttcaaagaatctcccatgtttttaaagcgctttgacatgtcatctgcgatgtcgttcgtgatggtagcattggtggctttcagagtgttcagcttggctgtaacctcaatgttcatgtcttcataggcgttgacggcttttgctgtggattttgatacaccgtctccaaaatcaattgtcgccggaagcactcgtttctttaaattgtcataatacttaaacccggcatcagctaagagagtcacacccgtaattagcgcgccgactggtccgcctaacaatccaagtccgccacgtaaaagaccgacaacagcagtgccttttttaagtatgttaaacaggccgaaaccgctttttgcaagcttcataaatccgcctgccccttttacggcatttaatccggttttgataattccggcaccgaactttaacagctcaggagcaaaggtaagaacgagtccggcaattgtcccgattggacctccgaatagagtaagcccagtaccggccacccgggatgcgccgccaagcccgcgcatcgctttcgagcttctatttgtcgattgctccagccggcccactcgcgtcgctgccacggcgtttgtttggttgagcctttccattcgggtggctgctactgttgccgcagtggaagttgtcgcaataccagctgccgctgttcgagatgcagcacctgccgcaacggcttcagtcgtataaacgccgagacttgcagatgcccgattgacgttaccggttaaatatcctccagccgtgcggagcatattccagcctgcggcgattctcggtaatgccccgattaacagcaaggcagccccgccaaaaagagaaaatactgttaccgctccggccgtaatagcaatagtgcttgcgacggagtgcggtaaggcatcgaaccacgtcactaatgaagtcagaccgtcagtagtagctctgatgatcggtataaactggtttcccatggtgatgacggcattgtttgctgcagatttcagatattctacagatccggccaggttgtccatctgcgtgtcagccactttttcagcaataccgccgctgttttctatttcctttgtgaattcttcaagcttatctttacctgcatgcatgagcgtgataaatccagatatagcatgttgtccggcaagctgtttagcgatccggatctgttctgtttcagtataattttttgttttctctgtgatctgccccatgatgtcggccaacgggcgcatctttccggtagagtctgtcacttttaaacctaattcttcaatagccgaagccgcaggtttaggcggagccgctaaacgggtaagcgtcgatcgaagtgctgtacctgccatgtctgcctttattccgctgtttgccagaatgccggttgccgcggccaactcttccatactgagacctgctgttttagcagccggagccgcatatttcatcgtttgaccaatctcctgcaaagtggcattggagttcgtgaacgtatacgtcattgcatcagcaacacggtttgtgtcctctgccttaatatgaaattcagttaagatgtcagaaacgatatcagccgtaacgccgaggtcggtttggccggcggcagccgtcgcaagcaagccgggcatagcaccgataatttggttcgtcttatagccggccatcgctaaatactgcatgccttcggctacttgcccatccgtatattgcgtaacagcgccgagatgtctagctgtttctgttaatgatgccaattgatcgtccgttgcgttcgccaatgcggcgacacggctcatatctttctcgaagcttgctgcggccttaacggttgcaccgatcccaagcgctccggctgcaccaatccccgctaacgcctttcctgtggctgttgcggatttataaacagcggtcagctcttctgatacatcctttgaatcctttttaaaaacagaaaaaacacctgcagcccgactgctgctgtctgacatgctttgaaactctttgctgactttattcagctctttgccgaggttctcatgaaccgcaatagcatcattcaaacgccgcgcttgaatctgtgtctcacggttgtcttttcctttctgcctgaccagttcttcataccgttgacggtgttcttggactaatctgccttgaatcttatacttattgcttaagccctccatctgtgattgcaagagctttgattggttgccagcatttttataaatgcttccggctgccttcatttctgaatttgccaggcgcatctgcctttttaagccttcaattcctcggttaaatcctgtatcatcaaggccgaccttaacgaccatatttcctataggttgagccatatgtatccaccccgctttcctggcaaagattcaacaaaaaagacaggctataagcccgtctaaaagaagacatcttcaaatttcacttcttctggtttattggtttcggtcaatatctctaaataatgatatatgtccatctcgtcaattgcgttcatactccacccttgttgcaggagagtggcgtaaatttcatttatttgctcgattccgcgctcgtaggtgtattctcctccgtctgttccggcaaaaaatcctgatcagcagcctcaatttctttatagccggcaacttccgagagaatgcggctcacttctttcgcaacttcaaaagattccaacccctcaaataattgatcataagtaaattgattgcggaatatcccaacaataaattgcagctgtttttcgaggattttgatgcttttctccaaattatccgctgttttttccgcttctgcatttaatcgtaatgcttcaagaagtgtttttgtatttgtccggggtgcaataaatgttttaaatttcttttcatcttcgaaccatagtttaatagaaatatgtttttgagccatgttgactcctccttttcatgcgattacaaagggaagctcttaagcttccctaatccctaagttaagcacctagatctgtacttgttttttgatcggcagtgggtgatgtataggcactgccatacactttttcataaaacttatctaaatcgaaattaggagcatcttcatccgcgatcactttatatacatcatcctggtctctttcaagaaattcagctgacaacttagaagtttgaaagtccactttttctttttttgtattccagtcgtcatcaggcagtgtaaaccgaccttggactaagccgacatatcgtctttttccattagctttcacaccaaagaaagtcatagcaatccaaggcggagtaacattcttcttaaataaatacagtccatctgtggtttcctctatcccaaacaaattgacaaggtgttctggcggaacatctctcatctctaagtctaatttcgttgaaccagttgaaacagcaaggtcaactaccttgttatcagcatattgcttttctgtagatgaatcagttgccatctttgcatttatcgcatgtggatagtcgacaatcttgctggcaacccacaaaccgttttctttttttaatggtgcgtattgaacgccttctaatcccaccattgagctgtattcaggcatcataaaacctccgattataataaaatgtttgcctcaaaccgataaccttttcgaatgaggcgctctgattgtaaaaattcattgataagaactgtcgtttgaaaatcaagttttcccataacatccaagattgccgccataattgggtcacacgactggttgtgatacacatcaatttgatacaaagtgctatctttaattggatgcccgtctgcccattcagtcgttctgtactctaattcttgaaccacaatgtaaggtggttggctttccaaaccttctggcacagccagttcatagatgttttcagggccagtcagcattaaaagcgctggatctttttccagcgcttcaaatactttattttttagttgtgatgatctttctactagattcacagtttaaagcctgcctttatgactttttccattgcatcaagcatcttgccattcgcctttaccatactccggtgaataaatggattggcagcctgatggagcgtaccgaattctggcaagtgaacacggaattttgtatcttttgtagggcctacaaccgcatatatttctccgtcttcatcccgcctgatacggctgccgactataatatcatcgtcaatgtgcggatgacttccgccaatggaagagcgtggagcttcctcattaatttccgcagccaaaacagcccctccggctttcactgctgctttatgaatcttttcatccttacgggccagatcagcgaaagtagattcaagctctctaaaccctttcaattccaattcaaaattcatcggctcaccacattcgctttaatcgtaatgaaatgccgccgcgaataattcggcaagatagcctcaatttcatatgaatcgccctgaaagacgattcgcatatgttcattgatatcttcccggtgccggattgtaaattgaactgttttttctttttgtatggccgctgcagcataatattcccggccctttaagccctccgcctttgcccagcattcaataactgtttcccagctatcatttccctccacaggcagacggccgccgggcttctttttttgaaattgaatgcggtaacgcatatcattcagcatctgacgccctccccggcaatgtatatttcagctgattgattaaggaggtcagcacaccgtctaaattagatgttgtaccagctatttccctgttctcataccaatgtgccacaaaagcatttacgcacatggcggcccgggctgattgattgggaaaagcaaggcccgttgccgaagtgatgtattcttttgcggaggcaatgaacgcgagaattaaatcgtcctccaggtcaccatcaacccggaggaattttttcgctttttctaattctattttttcagcttctgtcatctggcatcacctgcctttcattctgcagaagtagttgatttcagttcatcaatttgtttttgcataccatcaagtacagccttcacttcactgttcagatgatccatcatgacgctgcctgttccaatgttattgctgcgaactgatttgtcagcaagcatttcatgtacaatgctgccctcatcaataactgctggatcacctttttcgcctttaggaccttgctcgcctgtttcacctttcggaccagcaggaccaggttccccctgcggtccttgttcacccggatctcctttaagcccctttacaaagagtgggttttcttcactattgtcagcaacagaaatatccgtaataggcgctccttccccgttgtctcttgctgacgttagcacaccgttactttcgtttagaatgttgtttagttttgtcatcttttaatcaatcctttcagtattagtttccaagatcagcagattgttcaggtgtttccacttttgcatcctcaccaacaacaagatcagttacaatgattgcagcttctggatccactacttttccgtcgaaccgctcaataccgcggaaatatgtctgatccgtaagaaaggcatctccgccaacatctgtagatttgatttcaaatttttgacgatcaaacatgaagtaaccgcgtttaaagtcgccgaaaagaatgtgtgttttctgtgttttatcatccgtaaggacttcatcatagatttcaaccggacgcccaaatagcaagaaattatcctcatttcttggatcctccgctaaaatgccgcggccgtttttgtcttcgatatttgctagggtttcaaacgcttcagtattcatcacccaaacagcgttacgtcgataaccgcgcttaatttggtttttcacttttcttaaaaacttaatcgtaatgagtgacggtgctttaatagacttgaatttgccgctgctaatgataccttcaacgtttttctctccgccgtctccataaaaaatttcatcattctctgttacaacggctgattcagacagccagtccacgatctcttgaacaaaatttacaaatgaatcatttaacaactcactggaaacaggcatgattccggcgaatttcttgacgttataccaaatttgatcaaattccatattcttcagttctttaatctgttctttctccgctgtgttataaagttttccggcaacgcctttacgaaccgtataatttccggatggcgcagttttcggaacaacacggatcagattacgaacagagtttagttcctggatagatttcaaaatttcttttgaaatatcatccggcactgtatagccgccatctttatcgctgcctgcagataatgaacggttttctttcaaaacgcgttccatcatgtttcgttcttctgtttcaagatcatggctgcggccggtgagcactttcaaccacgcttcccggtattctttcgtcgctgttaagatattgcgctcttccgtctctttctttggttcacttttgatttctgcagcaaagtttcgttcttcgccaatctccggaagttctaaactgcggccctctgtcattaattcaatttgactctgcagctcttttgcttcttcaagcatgctgcgagcttcttcaggctttccatcctccaaaagatttgaagcctcttgtttcttttgtgtgaatttttgtcttaattcacgttctttttttgtcattgctactggcattcgggtatcctccttagatttgaacataaaaaatagacctataacgttaggtctaaaagttccaattccatttttagtttttctattggcgcatcgcgcatttctttaatctgttcaactttttctaaactgcgttcaccgatcacagcctccgtatcgttataagcaggcgttgtaacaagtgatatgtcaaaaatacgctcgatgttattgattcgacgttcatatacatcttcttcatcattatgacgccattcatccggctcattcttgttataatttagtgaaaaggcgaaggaacactgattaatgactccgcttctgatattctccattaaatctttagcatacgtcgtatctgtgggggtaaaacggaattttagaccaatagcatctgtctctaattcaagccgcccagcatcgccagaaacggtgtttctcgctaacggataatcctggcaatgattaaaaagcgctactacgtttgaaaggtccgtggaagctaatgcatcccggctgatgatttctttaaaccatccacctaaacgctcagaccatttttcaaattttaaggcgtaaccctcaataaaatctcttttttcttccccttcaccagcagaacgcaactcaatcttcgttgttaggtggcgaacttccttgctcatgtatgttctcacctcccttaacggaacctgatttgttcatttgatactcctccaatgaatcaaggaatgtatagttaagcgatacaaggtgcctatcaccgtgttcaattgcgtttttctcttcaaaagcacgaatttcatttatatttaatgcactgatccgttccataatttcataatactccgccctagatttcgcatcaccgcgcagctcgctgtttacattgaatttgatatagaacccgtctttaatctcttcatcagtaaagagtttcgtaataatttcctgttcaaaagaaaccaaccacggctgcagcgtgtttttcacgtattcaatcgattggtgttcaatattattgaatgttgcccggtccaactcattgattttatgcaatggaactttaaaaatagatgcgatttgtgccttattaaatttcatagactccacaaactgagcttcttgcaacggcatagatattgattcataagaaagaccggcatctataattgcaatgttccgcccggcattcaccttttcccattcatctctcgcccgctgttttgcatcttcgtctattaaagtcggaacttttaagattccccgtggtgttgcatcatttttatataattttgcattaaattttgtagcagctgactgcgcgccaatatgctcccttataactccgataggactcttaccgttgatcccgtcttctgtcatacccttgaaatgcaggatttcatctgcatacaattcaacactttttgaattaatgaccgtttcataccacagcatacctgtgtttgggtttacataggcttgcgtattggctgggtttaatggcaatagagctgtaataaagccattccgatctgtttttatataagaataggcattcccccacgtacaagcatgagtcatcatgagttttttccaagtaaaagccgtcatgtattgattcggctttagataaagcaattgggcaacaggatgatccatactgcttataatatttccttgcttttttttgaatgtatggacggcaagctttgcaatgtcatcagacaaaacatttatacacgaaaaaacatccggatgtatgagtgccgttgattcactgacacgttcaccgctagctgtttttgagccgccgaacatatctataatccaatcaggaggatttgcgaggccccaaggctcttcatcatttgatctcttagaaaacagcccttccaaaaacaattaatcacctccttttcttactgagcagcagtgcataaaatataaaaaagacacctgtcagaacaagaccgatgtctgtgtgcaaacgatatgcagctgccaatataaaagcaacacctatgataaaaagaaaatcatttaaaaaaagcattatggctgtcagtatttccttcactcctacaccacctttagaaagaaaatgaagctgacttgatatatgcgtttaaatcaacctcattattgatttgagaagcccgtacatacgcattcacaagcgcggcggccgggtcaatccgttgagttgattttgatttatccagcatgatgttctcttgagcatccacttttgttacagcgttccccattgcccaagttagaagatcatttttcgggtgtatgatttttttggacttgacctttgctctgaagtcttttgtcggctctgagagagttgccaccccttggcggatttcaaccattacatatccgtctgcctccatttgctgagcgaactgagtagcgttatatggatcgtatccgatttccttgatgcgccagccatgttccttctccattttcttaatatacgctctgatataatcgtaatcgacgacagcaccatctgttgttgttaaccagttctttttctcccatacatcgtaagggaccttatccgtgttcatccgctcatggaatgtatcctccggcataaatccatgactatcgacagcaaagctgccgtcatctaacgggaagatgaaagatgcggcggttaaatcaatcgtttttgacaagtcaatgccgacataacattctcggttcttcagctcaggaaattcatccgaaccgcaatccgcccaagcttgcatatccatataaccattctcgcgcatattaacccaaatgttcatattctttgtcatgaaatttctcattttctctggcacagcaagcgctacttccaattctccacgcaaataattcagcccatgttcgttagctgccacaatagggtttgcttttatccaattgcgctcatctttaatgtcatcgtctttatctaattcattaatcatcacaaaatacttttcattttgctcaactttattgggatccagtatacgtgaaacgtaatcgtattccacacgataggcgggattatttagctcaaaccctgctgtcgtaataatcatcattaacggttgagcacgagcagccataccagaagcgagtacatcgtaaatctctgaagttttatgggcgtgatattcatcgatgatgccgcattgcgggttgaacccgtcccccgttttacctgcatctttcgaaagcgcctctatttttgactgtgttttgggatgttcaatcttaccgtaagcaattcggtatttcttctccggcttattcaaaaggtcactttgcataatctgtgctttaatttcgttccaacagattttcgcctgttccgtttttgttgcacctatgtaaacctcggacatgtattcgtcgttagccattgcctcataggatccaacacatgccaggctttgtgtttttgtgtttttacggccaacctgccaatacacttttttaaatcgtcgatagccgttatccttatgcacccacccgtacacattgccgaaaataaatatttgaataggttccggcacaatattttcaccttgcaacggccctttcgtatgcttgaattgtgtcatccagtaaagaaatcgacgcgctttctcatcatcaaagacgtacggaaattctctggtaccttcccggctgatatcatttaaaaagcgctgacaagcccatacgtgtttttcacatgcgacaatctcacccgatataacgtcacgtgagtaatcaataagaaattgttttattgtcttcatacattaccaaactccttttccgcagcggtcttttctcgttcctcctgggtgcgggtaatagcgagttttgctcgagcagatggcgtaaggccgaaatcattcgcagctgatttcatttgatcatagtaattcttttgccgcttcaataacggatgctcttcaccaatcaactgaataggatttccatcctcatcctgtccctcggtatgaaccatgatcccatctttttcaatgatttctgaaatcgaaatatactgagagtatgcattacaataggcggccaacatgctgatatctgcttcagtgataatctccacctcagataacaaagcagcaacccttttaaattctttttttgcaattttatttaaccaaggtggcgctttaatattgtcggagcgcatttttatctttttttcatgctcagcacgcgcagccagctcatccgtattctttttgttgggattaccttgaattagttgaagtgttgcagatttagcaggtctcggcatgttttcacctcattcctttcaaaaaagtacgtttttttgcttgtttttttcatcaatcgtgatacgatggaatcaatcataaaaccagtcatatcaagccctctcggcaaattcgccgagggggctttttgctgttttcggaactttgaaaagcggtgtttgtttgcagaagggggatcgccgttctccgttcatttcccttccagagatttgttaggggggagggtcacttgcccttactgccgtgagtcttgttatgacaggcattacacaaactttcaaggttctttatgtccaatcgtttcgaccaatcttgctttacttccactatatgatgcaccatgtcagccggagtgaagcaatgcgctttcaaacaatgctgacagagataattgtctcgtatcaaagcaagttgtcttgttcgtttccattcagttgatttataaaaacttgttattgttttgtttcttgaatgtttgttgtaatgttttgtttcttcttgttgttgtgtcttgtgttcttcacagtacctatcccgagtaagggcacggcaaccacgggcggcacattcctttaggggcttgggcggcatgaacttacatccttattcctttgtttcggtgtgaatgccaaaaagaattgtagttcatatacattgattccctcaataccccttcattctgtcccgccatatctatgcccttacatgtctgcgtctctttttctatgctctctccatactgtgctatgaatcccatcatgcaacctccttacattccctctaaaccgacaccgtactcaagccgttagccgccaattgtctccttgagatttaccggaatcagtttacagggaatataaaaagcaccccgaaggatgcttttcttataactttcaatctaaatcctcaattactctgaatcgtctaacttcatttcttcttcttaaaacctcactatatatggcattaatcgctgttatagggtcagtatccttatttatgcccttgactctaaaccttttcaagtcagcccttgtcatagtatcagagccttcttccccccaatagtttaattctaaaatttccttcattgctaggtttaataaactttttgcaataggggaatttctcaggtctccttcaccagatttacctggggcctttaagattacttcgtacatatcactttcatcagcttcaaaaccctgaatccaatgattattgagatcctcgtcttgaaaaatctgagtgccgtcaatgattctgcgcccagtttgaaataaccgtactcttaacagagttactctattgtcattaaatgcatttagaaaatcttcatcgttcacagttcttttcgtattttgatagttaaatactgatttatatatcttttggaacgcttcttctaatatcattccgacacgcaccatagtcttatccttatctagattttttggaggatagtttctatgttgcacaagcattcgtttctcctgaagatcaatagcaataaaagtatttagataaggcgctacctcgggtgaaaaactgtttctttcgtcatcaacagaatttacatttggagcatgctcttcactaaaacaaaaagttatgatgttatcagtttgatcaatttctcttgttatacagtaatcaaaaccatgttcacccggaagctttgcgacgtttttcaaaaaattaaataattcagttgttttcgacgtcaagtcatttgcatatagtagttgatatactctaaaatccatgtgcataaaaaaccctaccttttctcagattaaaagataggattataatatcacattatttgaattttttacaaattatctgttgtaaagttccagatcatcaatatcaatccaagtttcaaatccctcttcatcagaaagtctaatttcagttccatgtttaccttctttaatgtccttaacaaacccaaccaatccaaaaatttcttcatcactattagatataacctcaaccttatcatttaaagtcaaaatatatccccctttaagtgctgtttttttactctcattcatcttacatgccctcctaaaactattcaacagtttattttgtattattatgtaaatcaaacaaaaatattcagcttttgatgtctctattagttagttggcaaccgtaagacgaaaaaacacccttttgacagggtgctcatttccgcctatgtttttgaaaatccaaaatatcctctttcagaaaaagcctgtcccggggcatctctttcattggctccaattcgccggtctttactaactggttcagatactgacgggtgaaccccaatatttctagcgcttggcttgtattgagtatctcatcttctaagaacttcttaattgcatcacgatctttagatttatacatttttgaatcatccttttttctcgagatatttcaagtaaagggaaaatgctttttcaatgattgaaacaacaaataaaatgatcagactaatgtcgagagccgtttttaatggccctgctgccacatcctgacggaaaaacagcatatacgccagggcgagaagaacaacaatatcggtggtggactgtacacttttcatttttttgaaagtggctggctttcaagtatttttctttagtcgccgcatttgctatacttggagcaagggagaagcgctaccttctccctcggctcaaaatcatctgcgctttcttggacgtctgcgttttttgattttgggcttttttgttttaagcttttccctgatgatgaggactttttcaacaactgtgagagttgtgaggatgatccccagtaccaatgcgatttcagccactttctttccctcctttctatactttaattatacctcataactttacttacgtcaagtaatttagtggacttttttcattatttatccaataaaaaagagcctattcacgctaaacagaataggctgtgatctgctctatttttcattttcagacgggaacgttcaatgttcttctgcacagttccttttttaatccccaataactgcgctatctcttcgaaagacatgttttgcacagcatgcatcatgaatatgtctttttctctttctgtgagaacggaaagggcatcagcgattctttccttctcccaatcacttacctttccttcagcttcttgaacgattgcgtattcttccgacagcgcatcaattaagctcggatcagcaagaatcgtcctttgatatgcgtctcttctgtcagcacctcggcgggcgccgggctgtcttccgttctgcagccattcgagagtgaattcaatatcgctgatcatactactgataatctttttgtcgttaatctgttcagccgtcagatcgacttcagccgtatctttgtagagccggtacatttttcttgtttctcttaaagctcgtttgtattcaatgattaaatcttgcattctgattcctctccttatttgcgcttagatgcgccgcccttgcctcgtttaagtgtttgcatgtttcgtgttcatgatttgttacgagaaacgttctgagcgctcctgcgtgtttttattgggctttttcttttcctgcttcatatcattcctccgttcaaataaaaaacggacaccaatcagagcacagtgattctgtgcaatgatcagtgtccgcaggctttccgtcttggactatattcgattatggagtaatatttttaaaaccatcctactcctcaggctgtttataaccagttaattcgtactttattttcgttgtatcctctactaagtcttttattatttcttttctaactgtcgcttttataacacttggtacacggaattgtatgtttctatttttcaagtccgcaaataattctggtgctatttttcctttaatgtcaccaattgaggttgtggaaactctgaactgattataagcagtatttacacttgttagttcaccttccacttcaatatcctcataagcaatttcactattttctttaagaatatttattaaaatatctaatttttcatatgaattttctccaaaagtaactactttagaatcaccgttagattttgtgctcccttccagcttaaacgtgtatttattttcagatacctttgtaagcatattttttaaactctttatactttcaaatgaataggactcatcaagaaaaatctgctcttcgatttcttttttattttttgttgtaatatcctgtataatttcaaaaagatggcttaacgatttttctggaacttcgaatatatcatcggaatccatttttatccaaactccaaatgatgacggttgtaacgagtcaactctaagtttaatttcttcagaaaagccttcgcctactaaattctttccaacatcttttgcaatatcattgattgttttttggaagttcccaaaaatatccaacaggaagtccaaacctatgtcatgactattttgaaaatccttaagaaccagtttaaatttgctgtctataatttcttcttgaatttttgttaattcctgatttgtaacataatcatactctacataaaaatcttcttctggaaaactttcagaatcaaaattatttgcgtcaacaacttcaatatttagttctgtattaggttcagttatagagggatctataaaaagatgatgtaaacgccttttttggtacagtttgtttaataattctaaaaccgaaattctttgttccaataaacttttgcactcaataacagaaattctgcaaaatagccatttatctatattatcttcactttcttcaatataataatttagataaagttcttctgtaggagacttagaaatgaaaaataaaggaaagtcatagtattcaaatatatgaatcggctttaagctttccaaatcggagtgttttttgattttcattttaaccctcctctatatcccctgcaaacatttttaacatatcgacatcctgaaatagccataaatttaaatgtgatcctcttatgttgtgtatcccgcattcttctgttattttccctttgttaattactttattcctaaaatgtttatgctttcttcttaatctctctgctgcttctcttttcgtaaaaaatgaaatagccagtgcttcacattcaagatctgaaggataacgttttttactctccctgtgattgagaaaatcagcctcttgtaatgtttcacttttagtcaacctaaatacaggttcaacatcttgttgaatagcatccgaaggtggacactgaggaggaaaatttttttctttgaaaaccattctgctgtatcctttccttaattcatttaaaaaatacccaaaatttataattgtttatgtaatttgatctaaaaacaactatagcagtgtttttaattttgagtacatattcgacaaataaagacaggaaaagacagaatgttagtttttcaaatgaaaaagttgccattctaactgtgtttcttaaagcacgttctaataaatttctaatatcaaatttgatgtagttttattaatcactcccctatccctggcaggacagagattacaaagaacacaaccgctacaaccgtcaatatcaaccaaccattcattttatcccgttttgcaataattgtttcatcaccaatcatctttaaatcatctgaacgcgctacaagaaccggtatatattgtttgggaactttcaaataatctgctgcctgttcgacggtcatcgcttcatctttcgttgctttgacgacacgttgtaatttgacttgtaatggcatcaattcaaaaacccctttgctgaataattacattcgttttatttcaccttgaaccctatttcgtgatcgactcgtgcaaagctgccttttgatgtttggattatggtctttccgtgctctgggacatccaatacatgcgctgttccttcagtaccatctaaaacgatgatacggattttcccaggctccatactttgctgaatacttccttcatgatttttaatttcttgggggttgtacacctagactcctcctgtgctatgatagaagtaccaattcgaatcataagcactgaggcataagcttcggtgtttttttatatccttagtacggattttcccagccgctcattgtgaacgctggagacggctttagttcctctcggtatatgatcggatgtttttcgacatatgctgccagttcttccggcttcatcttccattcctttaccggccctggtacgtaagtattgttgttgttttcttgcatgttgttaacctcctgattatttgatttaggatccatagaaaagctacctgtcatgacataatctcagttataatgacttccacccgcggctcttcactgtaaaacttgctaactttcagatcgactacctgactatcatccttgtatatcagatgatttaaagcgtctttgacaccttttacatagttatcgacgtccggctttgttacagggcgcaaaagtcctttttcagcgttctccttttttctcttcgatccggatacagctttcggcatcggtctgaatactctgacttccattgcgacaggaccagcaataacctgcttcggccgatgctgagatgcaaccagtgccacatactgcttaaaattttttgactttacaggatcgtacattctaacctttccgttttgaatggatccccgcggccgtccttgtgcgatcggctctccgtaaacaataaattgaatagaactcaacagccttttacctcccgtcaatctgttcccaatgctcgatctgcttttccttgtaaggtgcagtcagtaatataactggcatcgcggcaattgctttaagcacttctcaccagctccatttgccttattttctcctccaggatcctaatcaccggtgtgagatcctgtccgcctgtctgttcagccgggccgaacatataaatccctccggatccttgaacgttcgtttttaagctcattcccattctcctaacctatgatttaattgcattcggtctcccttgatggttaccgtataattacggcacatctgatgtatccgagatccgagcgcttcgtctatatctaataatgctgctgtatctaattcggatgaaatcagcaggggtttgtggttcaggtagcgataattaacgaccgattggatctgctcaacctgccaatccgtggcccgcggttctccctttactggtttaaataaatcgtcgatgaatagaacgtctgcttttctcattgcatcaagtttggactctagttggtcaaagttgtctcttaaattccccatcccttcaacgtaagggaaatacatgcagtaaacagattttttcttaataaggttgttcataattgccgttaataggtgcgtttttccgctgccaggctggccaaggagggcgatgctgttcgaacgttctcctttaaccttttgaaaatccttaaagtattccatagcgcactcatatgcgtctttaatcatggcaggcttgccgtctgtaataaaattaccgaataaaagcatttcaaattcctcggtaataccgctggcttccataagccgggcgatctttttccgtttcacacacttacattgcttagagtacgtggttttccactcccgggccttatccggtaagcacacttttcctgctaggtaatcctcttccctcaccatttgatcagcgtttagactctccattgttttttgttcttttctcagctgccgttcagtatcttggtgaacccgaaaaacaatgattcctttgtccttgcagtcaaggcaatcatattcagcctttttttctgagacggcctgttccgctgaaaattgggctgacctgtcccgtagttttttgagaatgcccgccattgccatgtccgtactttgtgttttgtgagctatcatgctgttttttctcctttctcttctgtgtaaacggatttgataggattgcttcaatgtaatttaaaccaaccttgctgcccttgttcctgaaagcctgtttcatagcctccatgaccttctcctcgccgtaatcttcaaccatatagccaattcgctgagcttcaattggtccgatagtacgagcgactttgttctcgaatagttcaaaggcatttttcattttttcatcgacttcctttctttcttgcggctctggtgacgggtctttctttttgttgtaatttcctagctgtatgtactccgcataattcaagactgtgacgataaacccgcgtttttgcggcagccggtccagctttaaatactcctgcttgaccattctgtctaacgagtatttgatctgatcggatgaccaattaaagcgctttgctagatccacaagcttgatgattgtctgaccaagttctaaatcttgatctgctcgatactctgcccgtttgaataaatgatcgtatattgtctcatcgcgtgaatctttaaatggcaggcggggtaaaatgacataccctaaaccttgattatccatatcgctcacctacttccttttacacactgctattagagccttaaaatcaatatctgttaattctaaagatggttcattggtcttcagatagtccgttacataccgtgtatataaacctttcctcatatcacgtcttactgtcttaaccagccagtaataacaatgaggaatcggaaccttaattaaatccttttccatcagctgatcagctccgagaaatgaatgatgctgtttaattgatttgttgcacggcaatatttgcatctctcacaccgctccggtttttcaccgccgtgttttacttgcagaatacgatccatacgctgttctatctcttcaagctctacttccattcgacccttatctatattgatgactgccttatccgggggatcctctttagacacccctacgataagaggctcaagccactcattacgcccagtcatacgcttttccatttctgcgtagagcgccatctgtccgatgtatccgtatgcttcgacaaacgagcaatagcctatttccggattccacaccttttctcgaagtgaacgggttgttttcagatctgcaaaacggctgccgaccgggttgtatacgtccagcttgcctttccacggaacaccgaagagttcggccgttacgataacttcctttgctccttgcagaacgaacatacagagttcgtcatgttgaattgcctcaatcattagatcagccaattgatactgcttgaacagctggcccttttgtgtaaaaagtgatggagtgttctttttaaattcatcaaaagcctgtttcccttcaagccaggcatgaacatattgaccgaagaggagagcctctgaacccggcggcacccattcaccgttaatcttggccattgttgccgcctcgcattgcagaaagctcttatattgtgaatttgacatataatatctatcaatctcgttagaatagtaattctccttgtttagcgccggaatcgccctcattagcaggatcaccagcctttttctttttttcatctgccttctcagcttgctctttttgctttttaaattcttcttcggcctttgacctagtcgcgcctgtggccttgatattgaagtaatcctctttttttgccatgccgtcacgcagagaagtatagatgcgcccgatcttcaaaaagtcttgttctgtgaaggcatcaacatcactgccgatgtattcctgaatcatttctttagtaacaccaaactcttttttgaatagagataaagcgtttctgagacgatcctccaaaggttctttatgaccgctgatcaaagtttgctgacacatatccaccgcagcatctacgatatcgcctggaataactccaaggatgcatgcccgtacccggcgcgctccctgattggctaccatttcgtaaatatcccttggatcatcaagctttgtgatagcaccccgcgccttccgttcatgcttcaccgtaaaaatcttggtttggcgggtattcgtttcaaggtcccaagcgtaagccatgacagaggattctcctgccttctgttccaattccataatcccgtaatcaatgttcccccagttctgcgccaacgcttcagcaagacgtatagacggaccagatacttttgagccgccacgtggatattcgtacaccgcattctcggccaacagtctccgttcacatgctttcttaatccgatcgaacgccgcgtatacatccctcgggaatttcttagcgatgaccatagcagcctgtacctcttgagcttgacgactgaccatagcttcggtagtcacgttggttgcctgttgaggtgcgggcatataatctgagtaatctacctgagacaatccattcattttgctgccacctttctcaaataagcttctgtgccgagcctctgccattctcggtatgcgtccattgacggaaaactgaatacaggacagccatacttgtcaaatgtaattgaaccgccaacctgacttaaacgttcctggtcgtccgcccggtcgctgaatgacactgtaattggttttgccatttataaaacctccattgttttctatgaggcgttttgatataattagattccaatcaatattcaaaacgccttacgaagtccactttgccgagtgggcttttttattgtgctgtttgaaattcaaaaccaagctgctcctttaagtaccgttcaagattatccctcaaaattacctcgctgctgtcgattacataatcatctgatggcattatggtgtccccaaaaaaatcctttttcatttcaggttctgacgttttgtcgtgccagttgttcaaaaccattggattttcaatgttcattgcgagcacctgcttattacagttaaattaataccgcgctgttgcattttcatagctacatcgtacaaacggcctttgtttgctaaccggttaatatcctccgtcaaaacttttatgcttccggctaagctaatggcttcctcgtaatcaccgtcacgtaatgcttcgcatagcataattgccaactcttcagctgaatccactttccgtttagctgcttctaaatctgatgtaagaaattgattgctgttcatatcgtaattgcctgcctctcctcatgttttgccattgctacttgatcaactagcgcttttcttgtccatctatccgctagttcttgtatctttaaaccgtgtccgcgggctagtgaatagatgagtgtcttgtttgccgggataagatcgaaaatctgtttaatatcacccattggcagttcccctgccctcctacccggcctgtcacttgccagccaacgggctaggtgttttgttgcttccaacgcctcttccaactgatggaccatattgattaccgcggcacttgcactttcatttaatgcaggatcaatgggcgcagccgctgttgggtgcagacggaaaagataatgcacgagatcaatatgttcataggcttcacatacttcaaaccacttaatgcatagttcaggagtgagtttgctaaagccattttccacatcagaaacatatcgttgatcctttcccccaattaaattaccgatttgatactgtgcaaggcccgccgattttcggacaccacgcataatctgcggtaaatttcgcaaattgtatgggttgttctccatatgtttgcctcctgatatattcagttttttactggtaaaatttaagtaatgaagaaataaggttgtccaatttgattcccacagttttatagaaattgtttcaagcagtttctgacgaaataaatttgttcacaaaataaatctgaccttttcctgttacctttggtgttcgtgtggttctaattgaaccgtcagggttattcattgttctcttcttaatttcaaagagacccatatccatacttcgctgtgtcggtagattgaaagactcgcctgtcttacgaatcagataaccattatcacggagccattgaaataacttgttaggcccaatcttaacgccattctgttgaatgattttcgctagctcgccaacaagcacagacgattcagacgcttccacagcttcggcgaaaagagcttttggcttcatagattcaatttgcttattttgctcttttagtgtgtgaagggttgttttgaaaagtaatttagtatgttcgtctacatgcgacaaatatgtttgaatgaactgttcatcatttgcgacatatcccccagtttttctgattgtagggatgacttcaattgctaaccaatcttggaattgctcagcaatttgattagatgctttgaaagctagcttgtacaccagtgattccgggatgaaatcgcctttcccaacctcttgggaaagatacttgtttaaatacctgttgatcgtttcccacctgatgtactctttgttatttttggtttgtgtgaagccaagtgattttgctacctgttcaacattgaagagaatttgatcatcctcaattttggcttcaacttggaagattccatttttgaatgtttgtacttgattcatgcggttgcccccttacggaaatactgggtattttcctccacccaacgggtatttcgttcaatccatttaaaaagcagctgggtcggaattttcttgccgaactcatcatttaccgggaaatcaggtcgcgacatgagttcagacatttttgtttggccgcatctgagtactttcatcgcttcttctctggttaagatgtgaggaagctcattcaacgcccccagccgctcgaccaacatatctgttgccctttcagcaatttttgctgcaatttgatcaatgaagttatcgtcgtattgcatggtaaacatatttggtacctcctatgctgtgtttgatttttgatcactactcaaaacgcgtactgaatcatcaaaaaaaagagtccatttaaaatccagaacattagcgatagcttttgctgtcggaactcgtgcatttctttcaccttgttctatagacgcgtacgttgttcgagcaatattagctttatttgcaacttctttctgtgtcaggccctttgataaacgtatatgctttaaccaattcctttgatttactttagaagctatgtctcacacctccaatactcataacgtgtcgttgttttaaatatactactcattacgagtcctgtaaatacttttttaaaaaatattactcattttgagtaattacatatactacgcttattgtggagttataatattgttagttccacaaaacgtgggaggcgataaatttgaatttttctaatcgacttaaagaccttagagttgataaaagactaaaacagcaagaagttgcggataaattaggaattgctagaacaacctatgcttcatatgaacagggaaaaagagagccggatcacgaaacacttattaaaatatctgattttttttgtgtctccatagattacttgctaagaggtcaagagtactaccaagataaagctaaagaactccgtaagcagaataatgttcgttttgataatgtcgaaggacaggaactgatgacggaggatgaaaaagataaatatcttgcagatgctctaaggcgacttgatggaattgaaaaaatgattgcagagaatttcaaaaacaaaaaagaggaaaagtaattattctttattgtttattaagttatttctgtttactaataagatcggaacttgaaccgaaatgcaaatgaacccgatccgaaaggataatttcaccatgttcctaatcccttatggttcaagggctttcaatcttattctcatctgaaactgatccggacttgaacggaatctcatcagtaaaaatcgagtcgttgagaaaagtcctttttttaaaattttgattagcccttttagggcttttctttaaacaaaacaccagaacataagttctttttcagaatgcatcaactctcctccccctacttattaatttcatttgtatttaaaacaactcctatacttagtctaagaggtgaaagaatgtataccaaagaattaatcaagggtaaaaaatggttagcagttggagaaggccctcgtgacccagtcaccggcaaacgaaagcaaattccgcggcggggcaaaacaaaaaaagaagccgagcaaagagtccgtgatgcaatagcagctttaaatgaagatggcatcgatgaatcaagagtgaaaaaggtaacttttgatcaagtcgcagccgaatggctggaagagtatatgttaacagggaagaaaaagaacactgtccgaatcagacgagaagagataaaaatattaaatgcctacattgccaaatctatcatcaataaaataaccttgagacagtatcaaaaaatacttaacaaactagcagaacaagggtattcacaaagcactatgaatggagtacatacgacagcaggcatgatatttaagtatgctgttaaagtaaagtttcttaaaagcaatcctattgcagatgctatagtgcctaaaaaaagaataaccgttgaagaaattgaaaataacaacatagctgaaaaatacctcgaaaaatcggagatcgaggaatttcttttagcagttaaaaatcacggtttacacatggatctggaacgattttatttacttgctttttcaggtatgcgatccggggagttatgtgctctcaaatggtctgacatcaatttcgaaacaaaagaactccgaataactaaaaccatttattcagaaagtaataacatgagagagtatgaattaactcctcccaaaacacctggatcaattcggacaattgctatagacgatcaaattatagccatgctgaaagcatataaaacgaaagtgaaaaagatgcatttgcaatcacaaacaaaattatctgagtaccataatgaaaactttattttcgcaagagaaaacgggtacccttacctgccaaaaagcatcatatatcggatggaaagaattctaaaaaaaacatccataaaaaaacatgcgactcctcacatattcagacactcacatatcagtatgttagctgaagcaggtgtcgatattgcgactgtaatgaaaagagtcggccacgatgatgtgaaaacaacaatgaaaatctatacccacgtaacaaataaaatgaaagaggatgcctcacaaaaagttcagcaaactttcggaagcatcctcgatctcgggatttcataaagaaatgttattaaaatgtgatttttttaataaaaacggataactaaccctctttaacccttgccacatcaagggtttttttcgttttaggaatcatattataaataatattcaaaaggacggcggtaaagcttccggcaacgattccgtttgtggtcagcagatttaagtaagacggcaggtgcttaaacatatcgggaacgacggttacaccgagtcccaatccgaccgaacacgcgacgatcaggaggttttcctgctttttaaagtcaatttgactgagcattttaatgccgtaggaaatgaccatgccgaacatggccaccatcgcgcctcccagtacggaagacgggatgatggtcgtgaaggctgcgattttcggaaaaaggccgaagagcattaaaagtgcgcccgtgacaccgataaccgcgtttttcttaattcctgtcagctgcacgaggccgacgttttgcgaataagccgtgtacggaaaagcattaaaaatgccgctgatgaataccgccaggccttccgcacggtagccttttgctaaatcacgttcagacaggcgccggtttgtcaggtcaccgagagcgaaatagacgccggttgactcaacaaggctgacaatggcaacgatggacatcgtaataatcggtgccgcatgaaatgtcggcatcccgaagtaaaacggtttaatcatttgaatggcatcagcattcgccacattgtcaaattgcacttttcccataaaatatgcgatggccgtcccgatgacaatgccgattaaaatcgaaatggatttcaaaaatccttttgtaaaccgataaagcagcacgatgatgacgagcaccgtaaatccgagggcaaggttagccggatcaccgaaatccttgctgccttccccgccggcaatatgattcatcgcgaccggcattaaggtcatcccgataatcgtcacgacagatccggttaccacaggcgggaaaaaggatacgagcttgccgaagaaaaacgacagcagaatgacaagcagacccgatgccaaaatgctcccgtaaatggctgaaatcccgtactccttaccgatggaaataatcggcgctaccgcggtgaacgtacagccgagcacaacaggcaagccgatgccgaaacatttattcctccatacttgaagcagcgtagccgccccgcacataaaaatgtcaattgatacgagatatgtcagctgttctgcgttcagtcccaatgccgctcctacaattaagggaacgacgacggcgccggcatacatggcaagcacgtgctggataccgagggaaagtgttttggcatagccgtttttcatgaacggacctcctgtacaaatgtcacttttccgtcttcaagcgattgaattctcgccagtgattcgacccggcatccttttttcaccagctcatctcttcccggctgaaatgacttttcaatgacgattccgatcccgcaaaccgctgcgcctgcttgttttacaatggataaaagtccttctgccgcctgtccgttcgctaaaaagtcgtcaatgattaacacgcggtcatctttcgacagatgatttccggagattgcaatctgactttctgtttttttcgtgaaagaatagacggatgccgtcagcagatcatccgttaatgtgagagacttcctttttctcgcaaagatgacgggaacgccgagttcaaggccggccatcaccgcaggggcaatgcccgaagattcaattgtgacgattttggttatctcgtctttttcaaaacggcgcgcaaattcccggccgatctgctgcatgagaaccggatcaatttgatggtttaaaaaagaatccactttcagcacttgatcagaaagaacaattccgtcttctgctatttttcgttttaatgcttccacaatgattacccccgcttataaaaaaataaaaaaagcattgcccgctctccaaaaaaagagcaagcaatgccgaatgatctacacgcaacggccgaataaaagccgtcccattgctcactcatagtcggacatttacggtgaccggtagaaacttgcgtgccatatccacgcgattatatgagtgttcgtatgatattaatcaaattataacaagatacacttcttttgcatagtgaaatttgaatatttccgaacttttacaaagaatttgttttcgattattcgtgtttttagaatttttagaaaaacacccggtgtataccgggcgtttcgtttataaatataaatttgaatatttgccgacgagatactcaatgagatattgaacgttcagctcttctcccgttgcatcttttatgatgtcaagcggcattttgcgtcttccgtgctgatgaaccttttctgtcagccattgtttgatcggctcaaaatcgccccgttctattaattggtcaaattcaggcagatcgtcaagcatggtatgcttcagctgtgccgcatacatatatccgagcgcataggaagggaaatagccgaaatcgccgcccgcccaatgtacgtcctgcaaaatgccttttgcgtcagatggcggcgtaatgcctaaataatcatgatatttttgattccacaatgcaggcagttcttccactgtcacttcattgctgaaaatcgctttttcaatttcataacggataataatatgaagcggatatgtcagctcatcggcttcaattcggataaatgtcggtttcgcctcatttacggcgcgtacaaagtcctctcttttcacatcttgaaattgatcaggcgaagcctcaaccattttttcataataggcggtccagaaatgttgatttctggcgataaagttttcataaaataatgattgggattcatgaattcccatggatgcaccgtcagataagttcgttccgctcaacgcttcgtcaatattctgctcgtagatcgcatgcccgcattcatgaatcgttccgaaaattgccgtgcggaaatcgttttcgtcatatctggtcgtcacccgcacatcgccccggttgattgtcgtcgcaaacggatgcaccgtctcgtccaggcggccgccgtcaaaatcatacccgaactcttttaagaaatacaaggagagggctctttgttgttctttcgaaaacgttttcgttataaaggaagtgtccggtttattgccggattccgtcacttttttgataagcggaataatcgcttccttcaattcagaaaacagctgatccagcacctttaccgtaacacccggttcgaaaatatcgagcaatgcgttgtatggatgatcttcatagccccaatacgaaataaaccgcttattaaaatcaatcagcttctcaaggtacggagcaaacatagagaaatcagaggccgcctttgcatcctcccaagccgtttccgctttcgatgttaaaatgacatattctttatactcatcttcaggaatttttttattatgatcataatcttttttcgcaagttccgccgctttcactgtatcttcaggcagctcttctgcatgcgcgagaaggatgtcgatcagctctttcatccggtcagatgtctggatttgaaaaacgtcagccgacagctgtccgatgctttccgcccggtcatcagagcctttttttggggatcccgttcttaagtcccaatgcataagtgcaatggcttcgacatagtgggatactctttttaacagatcaaaaaactctttttcatatgtatgtaaatccatatccgttcccctcccttttcactatcaattacaggctaatggaatgccgtgataaagtcaacttcccagatttaaaaaagccgcaggataagaatcctgcagctgttgtttttatacgattttcggtgtaacaggcaaaacctttttgacttcggccaagacccgttcactttctccgcccgcataaatggatatggttccgctgtcctgattagaacggatgaggcggccgattccctgccggactcttaagagcatgtacggcagatcaacttcctcaaacggatcttttttcgctccgttccgctttgcggtaaacacgggatcatgaggcggatacggcaatgcccaaatggtcacattccggagcgagtcaccgggaatgtcaagaccttcccataagtggacggaacaaagcacggattcttcatcccgctggaattttccgaccagactggagatctcttcgtcaccttcgtagtatatcggatacggcagctcccacgcggcagcctgttctttaaattccttcatgtcttcaaaggaagggaaaagaacgagggtgcgtccttcattctccttaatggtttcaatcgtttcggcagttttctgctcagacgtcatgtcaccgtgaagcgcaacagacatttgctcctcgtaatcgtacggagattcaacggtaaatgataaaggatcacggattccgagactgtcagcgatataatcaaatgaaccgccctcagaaagagtggccgatgagaagatataaggaatctttttagaaaagaccttttctcccaaaacttcggctactgttctcggcataacgacaaacgttgagtctgtatcccgcgtttcaagccagctgatggcatccttttgatacagcgacagcgaatatgccatttgttcgacgtattcttctacaactgacagctcgtacttatcgatcgtatacatttccgattcaaatacgagcgcctcgccgattttatcgagcagacggcacagttcgtcagccgcacgcttaacacgctggtcgttttggatgtccaatcggtgagagccggcgatttccttcgattcctctgacagcacatagaaaaactcatcgtttgcggcaagggcatcttcaatcagttcggcgaattcctctctgatgtcattttgaagcagacgctctaaaaacagctcaagcgtcgactgcttcacacgatacgttaacgctttttgcgcggcgaattccagcagatgtccttcatcaaatacgacggcgctgtgatccggcaaaagcggcagctgtccttcccttttgcgtgattcttccgtccatacatgctccatgtagaaatcatgggagcaaacaatcagatccgttgattttctgtaatgatctctcgaaagtgttaaaccgcatctatgtctcatatcacaagttaaacaatcttggaaggaatcatagctgacgcctgcccactcttcattcgtcaaatcagcgtactgtttgcggtcgccgtacggataaaagcgctgcatcgcttgtgattcgtgtacgaatgaaggcagcgactcataaagatccagccacttttcatcatcagaacgctgcatcgttttctcaagctttttcagacacagatactgctcatgggatttggacagccgtgtatcaatctgcagatccaaatgttctgtcagcttggaaatgtcgccttcttttttgacaagctgttcaattaacgtttcatcggcgcatgcgataatggccggtttacccgtatatctggcatagctgatggcaaacagcagatataccagcgttttccccgtaccgactcctgcctcagcgaacatgacttttttctctttaaatgcccgttcaagctgaaacgccataaatacctgctcatcccgaaggtcaaagcctttctcgggaaggatatcgtaaaacacgtcaccaatccaattgttcaattcttcgtaaaaattcttttcttttgttaaagcaaaaggcaaacgtgatgttgtcacccaactccaacccctaactattcggcattcagaccatctataatatcatttaacccttttcaatacaacaaaaaaacttggcctcgccaagtttttgccattatcatttccggttaatgatatgtgtacataggaacggatggtctgttgaatgtgtatgttttaccgcattttcaagttcttcctgtgcgtgtgtcatggcggaaggaccgaactccgctccggcttcttccagccggaaagcagttgcgtctaacgccttttgtattttactgaagtgctcgctgttcagcataaaatagatcacctctcaaatagaaataatcatcattctatgccgatgcttcactttctatacatgccattctgaatgatccgcacctgacctgcacaaactacaacagatattcgatcgaatatccatcttcacaaaattattctatccgggagtgatggttacatgagttataaagatcgattagatcagcattctgaattgtttcatcacaattggacgcggccgaaacgctctaaatcgcaagtgaacggccacaccgaaatgtcccagaccaacattattttacggagcaacgcaaaagcgcaccgctggtaatggcagaataaaacgtaaagatgtcggagaagacgctgtttcaggcgtcttctctttgttgcggctttttccgctgcggccgcactttagcccagtactgataataatccgttttgataaaaccgttaaagagcttccgttttttggttgcttttcttccgtagacctcttcaaattgttcatttgacgttaacatgtagacagaccatgtatcaagagattcaaatgcccggcccatttctttatacatctgctcgacttcccttttttcgccgagccgttcgccgtacggagggtttccgacgattacgccgtattcgagcttcgtcgtaaaatcctgcacccgcatttgcttgcattcgatcaggtcaccaagtcccgcttcttctgcgttttctttggcgatgtttaccatccggtgatccacgtcactggcaaagatctgcagcggctgatcatagttcgccttttcttccacttcaagacgcgccttgtcccacagttcttttccgatccattcccagtcttctgaaacaaaatcacggttaaaaccgggagcaatgttttgtccgattaaagcggcttcaatggcgatcgtgccggaaccgcagaacggatcgacgaacggacggtcaggcgtccagttggttaactgaattaacgcggcagcgagcgtctctttaatcggagctcctccctgatcaaccctgtatccccgtttgtgaaggcctgttcctgatgaatccagtgtaagcacggctttatcttttaaaagggaaatctccaccttatactcggggcccgtttcttcaatccattcattttgttttcctgattgaagtttcagcttttccgctatcgcctttttgacgatccgctggcagtcaggcacactggcaagcactgatttcacggattttccgataacggggaactttgcgttttccggaatgtacgcgcgccagtcaatcgcttttgttttttcaaacagctcatcaaacgttttcgcctgaaactcggcgacctgtactttgatgcggtcagccgtccgcagccataagttagcgcggcagatcgcaagcgcatctccttcaaaaatgacttttccgttgtctactttgcattcataacctaaatcacgcacttctttggcgacgatcgcttcaattcccatcggcgccgtcgctattagtgtgtacttcttcatcgtatcaccctgtctcttttaagctttcgtctcattcaagataaaagctcccctttaaaggagagctctaatttgtcatatcaataatgtttaacgttctgtaagccatgttttgttccgtcgtactgcaatcggctcatcacctcgtactcaggcggcaatcatctatctacagaaagcattctgtccttctatctgttcaattccttcaagaaggttcccctaccaaaatttgggtttctcgctcgaggggtttaccgcgttccactctcaccatttctgatgagacttcgtcactgtggcactttcaaggatactcagccatatccggagacgtaggcttttttcctgccgtcagcctatcaaggctgccctagcttatttcttcgctaggcacgaacactacgggcatctcagcaccgtgcgagcatggactttcctctacagattcaaagatctgcagcgattacccgaacgttaagaacacttgttcattataaagcaacttgtctcatttgacaagtgcatctgccctattcgtcataaagtttgctgccgaatacatgtttctcaaggttggacagccttttcagaatgtcaaagttggtcgtattggactgcaccggctgttttttgcttgcttcttcaagctgttttttcagctgcagattttcttgctgcagttcttcaatttcttgatgaaaggtttcataatccttaataatcatatctaaaaatttgtcaacgtcttcttgtctgtaacctctaacgcctgttttaaattctttttccaaaatgtctttcgcagaaagctttactttatcagcaagcatctttttcacctcatatcgtgaatcatcatgttatattttattcagaaacacgtcccgttgtcaaatattctctgacgtgttatgtaaagaaatcttcttcttcaacggcggcacggagatcatccatcgtaatcgaataaatcggatatccgtctgtttcacggcgtttttctgcctgctgcagcatatatttcggcgatccttccatttcaggatcatataaaagcaaaagcgcatctgacttttcaataaagaacgcgtttttctgccggaattggagcggactttcgtacggccgatgcgtcaggctctcctcataatctgcctgagcaagcaccgcttcatacatttctttattcggttccttccacttttcttcttggccgtagaaaggcgtgataacggcaacctttaattccggatactcttctctgagatcgtacgccgtttcagccgcccaaagctcagtccccagctgtccggatatgagaatccattccaagccttcgtcaataaagcttctgagtctggtttctatcgccttttttatataaacaagcgcccggtcatcctgtttaaaaattccgagttcaaacggcttgtatcctgttacggctaatactttcaattgatcacctgcttaaaaaatggggctccccatcgggccccattttgatttgctgatatcctaaccgatcttgcttaagcgttcaatactaatgatcgcagcaagggcttccgcactgaaaatgctggtgagttgtcgggtcaacatttgaaaaagtgtgcggatagtaatgaacgtgctcaaagttgtggtgatttacgttagttgtatgttgcggatgaatatgcggcacaactgtgttagaaaaacaatggtgttcacagcaatgagtcggatggacaatcggcggcatcacgtttggtctgcaacaatgatgatgaaacatgctaaatcccctctccattaacttatattacactgttaggttatgaagaaaagagggtgcatgttctaattcaatcacccaatttaaaagtgtgtcagcaagctgtctttaaaattcgaaaatacaaacgcaatcaaaaaaaccacgacaaagaacaagtaaaaaacacctttatacataccaactctcccctataaataactaacgctattttacaagatgcggcaccattctacaacaaaatcgatgcggattcagaaaaaaatatttttggcgaaacagctcggcttttgcgctttcccgggcaatatttcaagaaggatatttcctcttaagccgggcaattctcacatggagcttctcggcttctttttccgatatttccccgtcttctgccgcctgctgtgcggcctgcagagcttttttataatcttttgcgtgatgctcaaaatagatcgccagctctaccgctgattggtgtctgcatatgtgaagatcagagcccgtcagtttctcccaaaggggcacggcgtcttgcctgcggttttgttttttataaagcattgctaagtcaaaaagggcccgatccgaatcttcaaagtctttgccttgcagcgcttccagctgtgaaacagcccgatcggtttctttatgagcgataaaccatttcgccatggcgtatgcttcctgacgttctgacgtctgatcagaagatgcaaaaatcttttttgacatatggatgtaaagagcgatgagggaaagcacatcttgttcattatgcgagagcactccctttaaaagagccggatcctccgcctttaaaaattgaaaatacagcatcggcgccaaataaccaggtgtgtcttcgtcccttttaaaagcaagctcttcattttcaaccgctgaaagcgatacacgctctaatttatgtttccaaagccgcctcgctccgtgcagaagatcaaagtgtccgaattcaggaagtttcggaagtctgtcccgaagcaatgtatgccttgtttttacttgcggccagtcaaaggcttttccgttatacgtaacaagagacgtaatgtcaacctcacttaaaaagcttttgtaaagagccgtctcgtttcccggtttaggaagcagatgctgtttaaccgcgacacggtcttcatacacttttgcatgaccgagcaaaaagatcatattgccggccccgccgccgaggccggtcgtttcagtatcaaagaagaacagctggcttttttcgtatccttctgctgatagagtatgcgtcaaaccgcctttattccataatgccatgacgtcatcaagttcactgaagctgtaccgtccgtggcggtgcgaaagcggatagacggtttcgcggataagacagtattcatcctcaaaaaagaaaggcttcactccgaatgcctcccattcttctctaaatgggacttgaatatccgggaccgaaagttgtgaagctgccggctttttttcagcttccggcacattcaggtggtttttcatccgctttaatttatttttcaaggacatctttcgtcccccttttcttttacacgtaattcaagagccggagtatcgctttctttgcatctattccttctatttcggagccgatgcaggaaggacatccgtcttgacatggacattgtctgatcaggcgctcagccccttcattgatttcatcaaatcgcttatatacttcatcggcaagtccgattccgcccggataatgatcatacagaaagattgtcggaagtccggtatgtgcggctttgatttgcggcacgacatgcacgtcatttcggtcgcacatgacgtatacaggcacgatatgctgcaggacgtgggcaatgcctaaaagcagctgttcaagcgttttttcgccgatctccgaatccgtctctttcaattcaagccaggcagcactggtatgcagttcttcttctggaagatgaatcggccctgatcctatattttcaaatgtcgtcattttaatttttttaaatattgtcggaagtgcgttcacggttacatcgccgaaatgtaaggccgttttctttctgctgtccgttctgtcaatgtccagcactttcagctgcaccgctaaattggcatctgtataatattcgacatcgacctttcgcacgtacgcttttttatgatcccaatcaagcttttcaacctgatactgcaccccttcatgaagataaatcgcttcatcatgaagaagcgtcatcgcgctgaagcggtccatttctccgatgatttttacatcagccgtctctgaccggtcaacgatgaccacgttttcctgtgacgccgaacggagactgatgttggaggcgggaaaagattcgctcgcccagtgatagcgttcgcggttttcgtgaagcaccccttcttcttctaaatactcgagaatatctcttgcatcattttctccgaatgtttcatcggctctgaaaggcagctcatacgcggcgcatttcaggtgatcgaccagtataatgagattatcgggattaatccttgcagattcaggcgagcgtttaaagaaataatcaggatggcgcacaatatattggtcaatcggatcagagttcgccaccatcacgataagcgcctctccctgccgccgcccggcccggcccgcctgctgccatgcgctcgcgacactgcccgggtaccccgtcatcacgcagacctgaagctggccgatatcaacgccgagctccagcgcgtttgtgctgacaacgccgagaatgctgccgtctcttaacccccgctctatttctcttctttctttcggaagatatccgccgcgataacctctgacagacttcgcgccgatttctttttttacgatctcctgaatgtggcttaaaataatttcaacccggacacggcttctggcaaaaacaatcgtctggatcttattttttaaaaaagttttggcaagttcgttcacttccacggtggcgctttttcgaatatgcagcggtttatttacaatcggaggattgtaaaaagcaaagtgctttcttccggccggggcgccgttatcgtcaatcaggcgcactgattttcccgtcagctgctccgccaattccctcggattggcgattgtggcggatgtacagataaatgacggcgtgcttccgtaaaaagcgcagattctcattaaacggcggatgacgttcgccacatggctgccgaatacgccccggtacgtatgtaattcatcaatgacgatatatttcaggttttcaaacagactcacccattttgtatggtgaggaagaatggctgaatgaagcatatcagggtttgtgatcacaatatgcccggcttttctgactttctgcctgatggccggtgatgtatctccgtcataggtaaagcttttaatgtccatgcccgtctcgtctatgatttcgttcagctcgcttttttgatcctgcgcgagcgcctttgtcggaaataaataaagcgcgcggcttgaggcattttccgcgatagactgaagaaccggaagattatagcacagtgtttttccggaggccgtcggtgtgacagccacaatgctttctccgttttgaaccgtctgaaaagcggagtattgatgtgtaaagagccgctcgatccccctcttttcgagggccgcccgaattttcggatctacttgttccggcatcggcatggttttcgcctcccgcggttcctcttcatgccaatgcacaatattttcatgattttttaattcctgaatcagttcgctcagtgattttttcttcatcgttcacacctctttatgaggtacagtttaccgaatatttgtttgcctggctagatgaaaatcctgcacaagaaaaaaagcagggaatcagcccctgcctacttcatttttatcgtaaaaagctctgtttgtccttttttcgcttcatttgcgcctgcaaattgcaaaggttctgcggcatcgccattcataatcaccatagggatgacggtgctgcttgctttttcttttattaaatccagccggcacgttaaaagcagatcgcctgttttcactttgtctccttcttttacatgcgcttcaaagccttcgccgttcatattgacggtatccaaaccgacatgtatcaaaagttccgctccggaaagggtgcggatgccgacagcatgttttgtatggaacagctgaatcacttctccctcaaccggtgaaacaatgtctccgtttgcaggctcgacggcgatcccgtcccccatcattttttgtgaaaatacgggatccggcactgaagccaaatccatcaccgctccgtcagccggagaaaaaatcacttcctcggccggctttttccggctgtctcccaatccgaataattttttcagcaatgtgtgtgctccccttcctaaatgtgaatccgttaccagtttattctccactatttaaccatactttcttttttccttcaattcttaaccatacggcataacatcgcatagtctgtttgtaaaaaggcggtggtcatatggatcaatcacaaaacgataaacttgatccgcaaagtaatgaggacatcatcagccatgcgatggaccaattttttcactcaggtcccttcgcagaattgatgcagggttttcagcaccttgtcaattcggcttttactgaagcgcaagtgacgattgacgtcagagaagagccgaagggcctcgcggttgatatcggcgttcccgagacgttccgtgacggggatatgctggtggaaacgaaggggtgctaccttcacgttacaatccgctacgatcataaacaggctcattcatcccatgtgtcttcaagcatgacaagaaccgttgtcctcccgtataaggtgagtgaagaagatatggaaacatcctggaatgaacagacgcttaccctctttttccctaaaaaataagcatgaatgatggatatcattcatgctttttatttgaagatactggtgaagcctttcaccagcgatccgacctgatttacggcgcttaccatctgccccgttgtatctatcattttattaaagtcaaactgtccgttcgtttttttaaactgggagagtatgcctgagaattgggaagactgctgctgattcggtctgggaacggggtaaggattcacaaaccccggctgccccccgggcatggctgcctgaggaggagagggagcaaacggctgctgcatatgaccgtattcctgattcggataaaattgctgcgggtactgcccttgctgatgatatggcggctgtagcggctgtatctgctgcggatacggctgctgtaatggctgtatctgctgcgggtagaaatatcccgccggctgctggtacatattttgatatggctctgctctccattgcatacgacattcccccttgtctctcactaagtttctgctatatatgtatgaattccgccgtggttatgtgctttcggtgattctgatttttgtcaaatgctgtcgaaagtcttaattttttaaaaacagaaaaaagtcgaatcgttatgttaccataatctcaacatacatgagaggggatgcaccattatgaacgtatcatacttaagaaagcgttttgctgaagtgaaaaaatatgaaacagattgtgcagataaactgatggactttgcaaaattcctctatattcaaggccatctcaccgcaaccgaatttcgaaacagtatgaaggttctcgaagcaagtggagcagaaaacccggcgtatgaataacatacccgacccctttatataaaagaaggcagccgttttcagctgccttctttttcaatttcatcccttaatatacgaagcgtatataaaacagattcagttaaatccctgtatctttttttatgaatatgatgaacatatgattggagcatcagctctccgaaattttctgtaacggcctgaatttgtgcgtgatgaacgtatttcggacggttttcctgaataaacgcaagtgctgcttctgtccaaagcgcgcaaagccggtctcttttttcaacatcgggtttaataatctcaaaaaaatcatatgaacggcctgactcttttccatcctgataccttttttcggcttccagaaccgcctctatcatttgttctgtcagctccaataacgactgtgtctgcaaacggactcacctcagtacatatggtaccaaagtttttgcataaaatcagctgatccggcaggctctcggcaaatcctttttacgccggtcagccaaaaacaggtcatcaatacaaacatgaagctcccgcgcctcttcctcaaggcgggaaagtttctcctgtctgatttcttcagcttccgcctgacaggatctgactgcttgggtaagcgtcttttcagcagcagaaatccggaattcgatatcagaaagcagacggagaatatcagccttgctcgtgtaaacagacattcatgttcctcccttttatcacttgcgtctctttagaatataattctcgttttcataccgctctcctctgcacatgacaaaactagaagcagttcggcaaacaaacagagattatcctaaaaggcgtgcctttcgacaaaaaagtgccgcaaactttgtatgaaccggcacgttaatgcaaacgatacagttgaggaggtgccgtatgaaaacgagaccgaaaaatgcaggtaaacagcaaaaaaccgaagcaaaaacgactgatacgcttgataaaaaattaggcggcccaaaccgcccttccacgtaacacatcagcagcccgaaaccccagcgaacggtttcgggctttttcatttcttcagccactctttaaccgcgaagagcgcatggagctcccgtcttttctggaagtaccagtccgtcagttcaagctgtttcggcattttctcctgtaagaaagccccttttcttaaccttttttgaaaccaatccgccctttcgccgtctaatgggtgggcaacaatgggataggttgtcctcagcatcggtgatgttctttttttgatgccgatcattttctccatatcaaagcgtgaaccggtatgaggaacggtatcaagaaaacggtaaaaagaagcgtgaagatcagggctgaacagaaggcgggccagctgttttccgagcgtaattctctcttcggtttttgaaaaccgtttgacggaaattccgtataattgtccgtcaaatgaagggaatatcaccgtattaaagtgaaaccaatcacttaaataaaaaggaatcgtgccaaaaacattctttttaaacgaaggattttgtataataggtgcttggatagtgttttgttcatttataataagagcatacatgagccgttccgtatctccgtcacgccaaaagcggaaccattcttcctgcataaaagccgagacgcggaaataaggaagatgacggaaaagaggttcgccgatttgttttgaccactggtagaccagaagctgaggataggcatcagaaaaaatcagccaattcgccctttcatacgaaaggaaaaaccagtttttctgactgctgtcaaggccctcctgataaaggacgcctcttaaatcagtcatcgaccagcccgcattgcgggacacaaaggatgccaaaagcggccacttgatctcaggatggcggtcataatatgctttataggcattcgtccgggaaatattatcggcattttttattttcgtctctttttcgatcaggcgaagaatggcggttacggtctgtcgtttatgcacgttcattcacttccgtcactattagtttgataaggaggatggaaaaagtgattcggtacccgaatggaaaaacttttcagccgaacaaaacggtttcatcccaaaacagccagaaacggtcccattcatacagtaatcgcggcatgaccctcgaagacgacctgaatgaaacgaataagtattatctggctaaccaaattgctgtcattcacaaaaagccgacacccgtccagattgtaaacgtccactatccgaaaagaagcgccgcagtcattaaggaagcttattttaaacagtcttcaacaactgactacaacggcatttataaagggcgctacattgattttgaggcaaaagaaacaaaaaacaaaacggcatttcccctgcagaattttcacgatcatcagattgagcatatgaagcaggtggtcaggcaagacggcatttgttttgttattatatccgctttcggaaaggtttatttcctcgaagccgacaagctgtttgtcttttgggagagaaaggagaacaatggcagaaaatcgattcgcagagacgaattagaagatgcttcctttccgatttcccttggatactcaccgagaattgattatattagtattattgaacagctttatttttcgcaggaacagtagactgagcgaaaggttgataaacgaaaggttgagatgttatgtcagatcaatttacgagccgtgaagaacgccgtaaggcaaggcagacgaaaagcactaagccttcttcaccgaaaaaaggcaagaaacagcgtaaaggcggtttattcaaaaagattgtactgtccttggttattctgtttgtccttggcatagtcggcggagcggcggcatttgccgttttggtttccggcgcgccgtctttggacgaagccaagctgaaaacgccttactcttcaacgatttacgataaaaacggcaaagaaatcgcggaagtgggcggggaaaaacgaacctacgtcccgattaaggatatacccgatgttgtgaaagaagcatttatcgcaactgaagacgcccgtttttataagcaccacggtatagacccgatccggatcggaggcgccttggtcgccaactttacggatggattcggttcagagggaggaagcacaatcacccagcaggttgtgaaaaactcgcttttgacccatcagaaaacgattaaacggaaagcacaggaagtgtggctttcactgcagctggagcgccattattctaaagatgaaatcttagagatgtatttaaacagaatttatttctcaccgcgtgcctacggcgtcggtaaagcggctgaagaattcttcggcgtaaaagacttgagcaagcttacggttgaacaggcagcgacgcttgccggaatgccgcaaagcccgaccggatataacccggttaaaaacccgaaggcttctgaaaagcgccgaaacatcgttctcagcttaatggaaaaacaaggattcatctcaaatgctgaataccaaaaagcaaagaaagtgtccatgaaagatgaaggcgtcgtcagccaaaaggaatacgataaaaaggacacaaataaatacagcgcttttgtcgaagaagtcatgaaagaaattgagacaaaagaaaagaaagacgtcaatatttcaactgacggactgaaaatttatacaacccttgatacgaaagcacaagattatcttgatcaattgatgaacggagacacggccggcttttcggaaggcatgcagggcggcgtcaccctccttgatacgacaaacggagaaatccgcgccatcggaccaggacggaatagaactaccgggggattcaattatgcaacacaaggtaaaacccagcccggttcaacgataaaaccgattcttgattacggaccggtcattgaaaataaaaaatggtcgacttacgagcagattgatgactcggcttatacgtattctaacggcacaccgattcatgattatgataatagatacagaggcctaatatctatgcgagaggctctcgcagactcacgtaatattccggcactgaaagcataccaagccgccggtaaagataatgccgtcgacttcgcaaatgacttaggactaggattaaacaaagagagtgtaaccgaatcttattcgatcggaggatttggtgaggataaccgcggtgtatctactatgaccatggcgggcgcgtacagcgctttcggaaataacggaacgtacaatgaaccgcacgcggttacatctatcgaatttaatgacggcacaaagcttgatttaacaccgaaaccgaaaagtgttatgagcgactacacggcgtttatgattacagatatgctcaaaacagtggtgcaatcaggaacaggcagactggctcaagtgccgaatgtggaagtcgccggtaaaacaggttcaactaactttactaaaggcgatattcaaaaatacaacattgctccaggcggagtcccagactcctggtttgtcggatacacccctcaatatacagcggcggtttggactggtgtagaatctggtaacaaagcaggaaagaaatcactgtcttctgcagaccagcaagtcgcaaaacggatttttcaaaagctgatctcatacgttgatgacggtaaaggaagcttcaagcagcctgacagcgtcgtaaaagaaacagttgagaaaggctcgaatcctgccgctttagccggaccgaatacgccggatgataaaaaagtgacggagtacttcgtgaaaggaacgcagccaactgccgtttctaaaacgtacacgaaagaaaaagccgataaaccgacaggattgcaagtgaaatacgacaaagataaaaaatcattaaccttaagctggaattatgacggtgatgcaacattcaatgtcaaacaatccgttgacggcggaagctacagtgacattcaaaacagttcggcaaaagaagccgtcatctcagatgtcacgccaggctccacatacagcttccaggtgacagcggaaaacgatgacggaaaaagcgatacggcatcagcatctttcaaagtcccgaaagatgaagaagacgatgcggataaagataaagcgactgacgatgaacagaagtctgatgaagataaagataaggacaagacacaaaccgatgattcaaacacagatgacaatcaaacagatacgtctgacggatcggatcaaacaccaactgaggacccggataaaaaccaggatcaatccgataaggatcaaacagataacaacaatcagaatcagcccggtaacgggaccgataacaacggacagcaagaaaacggctctgataatgattccgattccggttcagacggctcaaataaacctgacagcggtcaaacggacaaaaaccaagactcatcttcaaatatcaacgggcagtccaattcgtcaaccatccagtcaaatcccgctcattagcggacgaaatccttcacctcaaccaggtgaaggatttttttcatacaaaaaacctccttatgagaaaaggaggtttttaacctttgttcatggcttcatatttatgatattgtttcttcatctccgtcatcaattcatcaagctgaataaacgagtgatattgagtcggttttgttaaaataaacgccattcgctccgcccaattgatcggttcggcgggaaaatgctttgtttcaagcacagtccagtcgagtgatgtaacccgctcccctgccgtccagtgaaaagcggcaatcagacaggcaattcccttcagcatgtcattttgatcacatctcgattttcttgtttgaaaaacgggaagcagcgtttctttcgtctcgttccaaatctgaaacagaaacgggacatattcgcccctttccctccatggctgcacggttggctgaccgctgaaatccatatacagcggatggcggcgcaacgccgttttgacctcgaggctttccaagtccgtaaggctgcgcaggtatgtttcatagcctgccagaatgtcaatcgccgtcaccgtttcaccagcccttttttgtcacgcttctgcccttctctgcatagcggaagcaaaggacattccgcacagcggggagattgcgctttacaatgatacctgccgaaaaatattaatctgtgatgcgtaacagaccaatcctctttcggcacttttttcattaatgttttctctacttccaaaacagagtccttccagcggcagataccgagccgtttagagacccgctccacatgagtgtctactgcgatcgcaggtacgccgaaagcaacagacacgaccacatttgccgttttccgtccgacacccggcagattcacaagctcatcccggtctttcggcacttctccgccgtactcttcgatgatcattttgctcagcttttgaatatttttggctttattgcggtacaggccgattgatttaatatcctgctggagttcttccagcgatacggcaagataatcttcgggccgtttatatttttgaaatagcgtttttgtcactctgttgacgagagcatccgtacattgcgcggataatgcgactgccacaaccaattcgaaaggatttgaatggacaagttcacattctgcgtgcggaaacatatcgccgattttttcaagacaatattcaatctgctttaaatttaacacgtttctccccttctcatgttattgttccagccaattgtaaaaaggcacctgcctcgtatactctttttgcggatcattttgtttcgtttgaacacgccggaatttttggctgtgcgccttcgcctgctcaaccgttttgaagccgttctttttccattcaaataaaatccggtcaatatagcgaaaactgagtttccccgataaaacggcttcttttaaggcgtgtttaatcagaatcgcatcatgctgatcctggtcctgccatatggccagcgtctcgcattcaagcggcgacagcggtcttccgaactcttcttcaaagatggtatacaggcttttttgttctttttctgacgttctttcctgcgtttcattttgagaatgctgcatgtaatcatacagcttcgcccataacggctgcagagaatatttttcaaactttatgccgttatggtcttcacattcttcaataaacagaaaacctttttgaataaacattctcaggcagcttgtacattcttcagcagagatggacatgcctgactgaagttcaaacggcgtcggaaaataagagcccttttccaaatgcattttaatcttcaaaagcaggatcaattcggtttcattcagcccgagctgccggtaatgtgtcaacagcaggttgggaatgcttgaaatgccaagttcctgcatatctataaattgctgttttttcatccttacacctcttactgtaaaaggttatctccgggagttttcccctttacttagaaaaagtctcccttgcaggagacttcgtttttcataactattacggatacagacggttcagaagtctcgggaacggaatcgtttcacgcacgtgaggcgctccgctgatccaagccactgtccgctcaagtccgaggccgaagccggagtgcggaacagaaccgtattgtctgagttcagcataccatttgtaagcatctgaatccagaccgtgttcttttaatctttcttccaataaatccatatcatgaacgcgttctgaaccgccgatgatttccccgtagccttccggagcgattaagtcggcacataacacgacatcgtcacgatctttggcaggctgcatataaaacggttttaatgacgtcgggtaatgagtgataaacaccggtttgtcatagctttctgcgatcgctgtttcatgcggcgcaccgaagtcatctccccactcaatatcgtcaaagcctttttctttcaggaattcgatcgctttatcgtacgtaatgcgcgggaatggcgctttgatttgttcaagcttcgatgtgtctctacctaatgtgttcagctcgatcttacaatgttccagcacactttgtacgatgtatgcaacataattctcctgaacttcaaggttttcttcaaattcaacaaatgccatttcaggctcaatcatccagaattcgatgagatggcgtttcgttttcgatttttccgctctgaacgtcggtccgaaagagaatacttttccgagcgccattgcagctgcttccatatacagctggccgctttgagacaggaaggcgtcttcatcaaaatattttgtcgcgaagagctcagtcgtgccttccggagcgcttcccgtcaaaatcggcggatcaactttcacgaagccttctttattgaaaaattcataagtcgcacggatgatttcgttgcggattttcataattgcgtgctggcgtttcgaacggagccataaatgtctgtgatccattaagaattccgtaccgtgctctttaggcgtaatcggataatcagtcgcttcgtgaatgacttcaatggatgtaacagcaagctcatagccaagcggtgaacgctcgtcctctttcacaattccttttacataaagtgacgtttcctgtgtcactgatttcgcgatttggaagatgtcttcttctacttcagctttaacgacaactccctgaatgaagcctgtaccgtctctcagctgtaaaaatgcgattttaccgcttgagcgtttattagcgacccaagctccaatcgttacttcctcgcctgtgtgtttatacacttggttgattgttgttttcaaactctttccctccagaacaagaaagacattcaggaatctgcctgaatctcttttttcatcactttattatacccgttctactctaacggggtcaatgcaagtgaaaagcggctttaaaagccgctttttcagaatcagctgtgtttttccgtgaagcggcggattctttcgaccgcttcttctaaaagatcgagtgacgttgcgtaagataaacggacgttgtccggtgagccgaagcccgagcccggcacgacggcgactttttcttcttccagaagcgccttgacgtattcatcgacatctttgaatccgcagttttctgcggccgctttggcgttagggaacaagtaaaacgccccttcaggtttgacacaggtgaatccgggaatctcactgagctgagcgtaaatggtgttcagtctgtgctcaaatgcctgtctcatctcttccagcggctcagccggaccgttataggccgcaatagcgccgtattgagcgatagacgtcggatttgatgtgctgtggctcgcaaggctcgtcatcgctttaataatcgtctccgaacccgccgcatagccgatcctccagcccgtcatgctgtgagatttcgacacgccgttaatgatgatcgtctgctctttcaattcatctgaaagctgtgctattgagacgtgtttttttcctccgtatgtaagcttctcataaatctcgtcggaaacgatcagaatgccatgctccagacacacttttccgagttccgcaagctcttctttcgtatacataacacctgtcgggttgctcggtgaattgataatgagcgcttttgttttctcggtgatagcctgcttcagctgctccggtgaaattttaaactgattggattccagcccttctgcatagacgggacgcccccctgccagtttcacctgctcagggtagctgacccagtaaggagtcggtataatcacttcgtccccttcatcgagaataacctgaaataatgtatacagagcgtgtttcgctccggtgcagacaatgatttctgacggcttatattcaatcccctggtcgtttttgaatttttttgcgatactgtctttcagcgccggcagaccgcctgaaggcgtatatttcgtatggccttcattcatggaacgcaccgcggcatctataatgtgctgaggcgtattaaaatccggttctcctgctccgaggccgatgacatcatggccttctgctttcagctctttcgcttttgcagtaattgcaagtgttgcagacggtgttaatgcggatactctttttgccaatttcaacttgaactccccctaatacgtctcacggtgtgatgtttttgagaatcttgccgcttgtaaagtccacataactaaagctatactgcccgcttttgttgatataggtcacttcccataacggaacattgttttctctcgccgggtgaacaccattcagcttggaaacaagcccttcgtcccgaacgatcttggcagccttgccgcttgaaatgccgtcactggctttttttgagagaatttttgcttttttgtcggccggaacccatacatacatatcttttccatgtttatccgttccggtaacaacataatatttctgtttgccgacaaaggtctccactttctcagcatctgtcagatccgttttttctttagcggctgcggcagctgtttcgtggccttcttctttttgggccattgcagatttaaaaatgctggccgaaaataaaagaactgctaaaaaaataataccaaatacggctgtaaatattaatgctttttttctcatctttttcacctatgtgcgataaatggtgaagaccgcttcattttgattttcttcgtcgagcgcaagcccgaacatcagattgtcccgtttcaaagtccgatttaatgtatcgacgattttatataaatcatctgaatgctccacattaatcgttgacagaatttcaattttgctttccatttttataccctccatcggtcgaacaaattttgttagtcataacgggatgcgcccgcggcataataaaatcacaaggcggcatgaacccgcttttactataaaaacaattcctcatcccacaccacgaaagccgcgtttatgcggcttttattccgtttggctgacataatccccgagttcggcatccgtcagctccaaaagagatgaagtcgggagcgcttcaagaaacagccgtccgtatcccgccgtctttacacgctgatctaaaagaacgattgttcccttgtctcccgccgtacggagcaggcgcccgatcccctgtctgaacgttaacacagcctcaggcagggaaatcgtctgaaacggatttttcccctgcttcttggcaaattcgcattttgcggcatgaagcggattgtcaggcgccctgaaaggaagtcttgcgatcatgacggttgacaattcatcccccggaaaatcaacgccttcccagaaatgattcgtcccgagcaaaatcgcccggcttgccgttttaaaggttttcattaatttaccgggactcccgcccgaaataccttgggcgagaagctgaatgcctgatatctccatactgagtttcagttcctgatacacttttttcagcatatcatgagacgtaaacaggacaaggatcttcggctgttttccctttgacatgatttctgcatacttggcaatatgctcaatgacttcccgctctccgtcatatttaacggatttcatctctttcggaatgatgacgttcatctgatcatcgtaagaaaaaggagacgggatgcttttggtgcgcggataaaaatccgcaagcccgagcctttcaatcataaattgaaaagaatgctccaccattaaggtcgctgatgtgagcacaacgctttttttgcgggcgaaaaactggtctgccagcatttcaccgggctccaaaggctgcgcatagatgctgacggcattttttgcgcccttcgcgtcaatttcaacccaaacggcttctttctcatcattttcaaacagcagcctgctgaacgtatcgcgatattctttcagccccctgatacactttacatattcggccgctaaaaaagccgctccgcttttcatctgatcaagcttttgatgtaacagtttctcctgtactgaaaacatgtcaagcagctgatccagcatcgcacaaagccgctccgctccgtccgttatcatgtgaaaccctttatcctggcttttatgattgagactataaacgagacggttcagatcgtctttaggttttcttcgtttgacaaaagaatgcaccgaactgaaaaatgcgtcgctttccgattgaatatgcttcatccactcatcggcgtcaaaaaaactttccgccggcagttcatacgtataaaacagttttctcatccgctttaacagtccgtgttcctttaaggttccgattcggctgagcttagtgtgcagtccgatgtatgaagctctcttccccaggtgctcgctggcagtgcgttcgaaatgatgcgcttcatcaatgatgatcgttccgcttgcaggcagttttttcgtttcactgctttgatctgaaaacagcaaagcatggtttgtgataatcagatctgcggcctgcgccttttctttagcccgttcataaaacccggcagccgagtccttcccttttttcaaaaaagaattctcatcgtaagccatgcgctcccacagcaatctgccgcctgatggaagattcagctcagcggcgtcgcccgtttcagtctccgtcagccagacgagaagctgcgctttcgtcaaaaccgcatcatagttgtcatcttcctcatgcagaatatgttcaaacttaggcaggcacagataatgtgatttcccttttaaaatagcggctttaaccggccaaggaaacatacgctccaaaagcggaagatctttagacatgatctgctgctgcaaaagagtagagtacgtgctgataatcacgggagtttgctccgctttggcaaataaaacagccggaacgagataaccgatcgtttttccgatgccgggtgccgcttcaatcagcgcatgctcccgattgcggaaggcgccaagcacttcatccatcatcgaaagctgccctttccgcatttcatagcgggggatgatgccggataagatttgttctttttcttcgttccacttttcaagatcaatggccgcattcaccggacgggaaaccggaatgtgatcgggctctttaattgaaaaagaggcgtatggaatgcagcgcttttcttccgccggcctgctttcatgtataaaagaatccaaaagcagcgtcaaatcgctgataaaatgctgtgaaagccttctaagctgctttaatgtcggtaaaggcaaatgtttcagtttatgtaaaatgtctaaaaagaccagtcccgtaacctccgcatcgctgtctgcgcggtgagggcggtcatgaacaatattcagctccgcacacaactcaccgagcttatatccttcaaaccccgggaaaacaatacgcgaaagctcaaccgtatcaagcacttcacaatccggcagctcatagcccgcttcgctcagttcataccggacaaatccgaggtcgaaatgaatattgtgggcaacaaaatacgcgccgtcaagcagatgaaaaatctcctctgcgaccgcttcaaacggcagttcattttcaaccattccggacgaaattccggtcagctgttcaataaacggcgggatggcctgattcggattgatatattttgaaaaccgctcagttatttgtccattttcaatgacaaccgctgcgatttgaatgattttatcgccctttttcggcgaatttcctgttgtttcgacatctatgacaacgaaccgttgtttgttcattaaaatggacacctcaattcttacatacgagaaaagtgtaacacgttttgttgagaaatggagcggaaaaacagcttttgcccctaaatcttaaaagaaaacccccatgaagggggctcttttacaaaatcgtgtgtgccggctcctgacccagcatctgctcgattttattctgatcatccagaacggccaccttcggctgatggctttttgcttcctgatcagacatcatttgataagaaataataatgactttatctccttcttggacgagacgggcggctgctccgtttaaacagatgacgccgctcccccgcttaccgggaataatatacgtttcaagtctcgctccgttattattattcacaatctgaactttttcattagcgagcattccgacggcatctaaaagatcttcatcaatcgtaatgctgccgacatagtttaaattggcttccgtcacggtagcgcggtgcagttttccggccatcatagtgcggtacatattatgatctctcccattcatcaatatcaataatgatattatcaatcagtctggctttagaaaattggacggcgcaggccagaatgaccttgccgtttaatgttttaagcggagtcagctccggataagcgtacagttcggcataatcaatgacgccgctagtgttttcgatgatatcggtgacggtttttataacggtttccggatttctttcaccgtctctgatcagttcggcgccttgctgtaatgctttatagatcatcggcgcttctttgcgttcctgctcagtcagatagacgttgcgagagcttttggcaagtccgtcttcttctctgaccgtgtccactgcaaccaattcgatatccataaagaagtcctcaatcaatccgtccacaaccgctgcctgctgggcatctttcaggccgaagtaggcgcgggtcggtttaacgagattgaaaaacttcgtcagcacagtggccactccgtcaaaatggccgacgcgggaggcgccgcacaacacgtcagttctccttttcacttgcacggcaacattttgctcgcctttgtacatgtcacttggagacggcgtaaacaaaacatctgcccccgcctgttctgcaagccgggcatcgcgctttaaatctcgcggatatgcttcgtaatcctcgcccggtccgaattgagtcggattgacaaagatgctcatcacgacaatatcattttctttgcttgctttttcaaccagcgtcagatgtccttcatgaagaaaacccattgtcgggacgaatccgatcgtccggccttctgagcggtattgtgcaattaattctttcagctgttgagtttctgtcagttgtttcatcgcttactttcctccgtacaagccttgcagcacagtttggtttatctgaaaggaatgcttttcttccgggaaaacccgttctttcacatcacggacgtaatcgctgagggccgactcaatcgtgccgtcgattttggcgtattgcttcacgaacttcggtgttctgtccacgccgtggccgacgacgtcatgatagacaaggacttggccgtccgcttttgaaccggctccgattccgatgacgggaatggatacttcttcttttattttagcggtcagttcagcaggcacgcattcaagcacgagcatcatcgctcccgcctgctcgcatttgatgctgtcttcaatgagctttttcgcgctttgctcatcttttccctgtactttatatccgcctaatacgccgacagactgcggtgtgaggcctaaatggctgacaacgggaattccgccgagagtcagcgcgcggatggattcgaaaacgccgtctccgccttccagctttaacgcgtccgcgccgctttcctgaataatggccgcagcgtttttcaatgtatcttcttttgaaaggtggtaagacataaacggcatgtcagttacgataaacgtatttttcgcaccgcgttttaccgcttttgtatggtgaatcatgtcactgaccgttacgccgactgttgaatcgagtccgagcacgaccattccgagcgaatccccgactaaaatcatgtcgactcccgcctgttccgcaagctttgcctgcggataatcgtaagcggtcagcatcacgatcggctctccgttttccttcattttcatgaaatccagttttgttttcattctgtttctcctcctctaaacggtgaggagatgagccgccaattcttcgcaagcaaaaaagccttctgtaaaataagaaggattcccacttgtttaacgttcggcgaatgtcatccctctgtcccagtccttttttggatcaaggcagacttttcgtaatctctgttctgctgatcaggtgcagttcattatgatactgcccataggaagtataccaaattcacgaggcttgtaccaactaagattaattgagctcaatatcggcagaatagatcttctttataccgtctctcgtttccaagagaagaactccctcatcatcaatgccgagcgatttcccgtaaaacgtcccttgcagcgttctcgctctgagctcgttccccagtccgaccgcatagctttcccatagcagcttgatcggtgtaaagccgtggttcaagtaatcctgatagcgtttttcaaaagtcagcagaatctcttgtatcagacccgctctgtcaattttctcgccggcttccatgctcaggctcgtcgcaatgtcctgaagctctccgggaaaatcggcttcctgctggttcacgttgatcccgatcccgagaataaccgaacggacacggtcttcttccgcctgcagctcagttaaaatcccgacggcttttttgccgtgaatcattaaatcattcggccatttaatggcgggctgtacacctgtaaaagcctcgatggcctgtacgaccgcaacggcggataacagggtgagctgcggcgttttttgcaaaggaacgtcgggtctcagaatgaggctcatccaaatcccgtttccctcctgtgaatgccatactctggccattcttcctctgcctgccgtttgtttatcggcgactacgagcgtcccttccggcgcgccgtcattggcaagttcatgagcggttttttgggtggacggcaggacgtcccggtaatgaagctgtttgcccaaaacctctgttttcagcccgaaacgaatttcggattcactgagtttccccggttttttaatgagcctgtacccttttcgtctgaccgcctcaacctcatagccctctttgcggagctcctctatatgtttccaaacggcggttctcgagcagccgagcgcgtcacttattttctgcccggagataaagccgtcacccgcctcagaaaataaatcaattaattgggttcttaatgttgatcccatgatgcgagccactcctttatgtcatgttttcggttagggagcttccctgccaataccgcttcttcaatccagcgaagttcttcggccacccatttacccgcgcggcggtttctgagctccatcagatcagcgcctgaaatgtcgaggtctcgaaggcttttgatcggcagcttctcatacaggctctgaacctctttcagcttttgttcatcaatcgtcttatgctttttcagcatcccgattttaacggctgataacagcgcctctcccgcccggtacatcgcttccgcttccagctgcgccggataaacgcttatgatctgcaccgctttttttatgacttttcccggcagtttccattgttttaaaaacgcctcggcgcttttcggacaaagaccgagaaacaataacagcgctgcccagcgttcttcgcgtgcatctaaagaagaaaacggaaagccgctcgcttccagcatttgctgctcataaccggaaaggccgggcagctcttgtatcagacctgtctgcaccatcgtttgaattgcatcctgtgagaaagcgccctgcagcagcttttcaaactcgacggtctttcgttctactgatacatgtgccaaaagctccctgtcttttatgacggcctctcttgtttctttttctaacagaaagccgagctgactcataaagcggacggctctcatcatccgcagagcgtcttcccgaaaacggtcttcaggattacccaccgtacggatcagcttttgtccgatatcatgtgcgcctccgaaataatcaagcagctctccttcggcagacatcgccatcgcattaatcgttaagtctctccgctttaagtcttctgataaagaagtaatgaaccgcacagcttcagggcgccggtagtccttatattctgattcggcacgaaaagtggtgacttcataggtttcatcttcccacaggacgatgacggtgccgtgctcttttcctacatcgacagtccgcttaaagagacgttccacctcattcggcgaagcgctggttgcgatgtccacatcaccaatttttcgtttcatatagctgtctctgacggctcccccgacaaagtacgcctgatggcccgccttcatcaggcgatgaaggatggggagggctttgacaaattcctgttccataagatcactccggtcctgccaattcgtcataaatccgttcatactgactgacgattctttgcgaagaaaaggcggtctccgccattttcagcgcatgatcagtcaatcgtttgctgagctgtttatcttctaaaacggcaagcgctttttcagatgccgcctgaatatcgccgacttccaccagaaaaccgcttacttgatctttaatcacttccgggattccgccgatatttgttccgatgcacggcacgccgcaggccatcgcctcaaggaggacgagtccgaaactttctttttcagacagaagaagcttaagatcgctgatagaatacagctcttccaccctgtcctgatttccgaggagcagcacttgatcctgcagtccgtatttttcgacaagctgccaagcgacgcacttttccggcccgtcgccgacaagcaggagcttcgcctttgttttggctgcgatattacggaaaacgcggatgacatctgtaacacgttttacctttctgaagttcgagacatggatgacgactttttcatccggcaaaatgccatgtttctcttttatactctctgtatttttcttaagataaacacgttcatcaataaagttgtagatagtttcaatttttttatccggcttgattaagtcatatgtttctccggcaagcgcggttgataccgccgtcactctgtcggacgcttcgatggcaaaacggattaaatcttttaatgacggatcatatcctaaaacggtgatgtccgtaccgtgaagcgtcgtcacgatgccgatgtcgcgcttgagcatctgtttggcgagataagcgcataccgcatgcggcagcgcgtagtgcgcgtgaatgatatcaagattttccctcgcggcaacctcggcgattttgctcgccagcgtaaggtcataaggcggatatttaaataccgcgtattggttgacttccacctcatgaaaatgaatattcggatgatatgtatttaatctgaacgggatgcttgatgtgatgaaatgaacctggtgccctttttctgcaagcagcttgccgagttccgtcgcaataatacccgagcctccgacactcgggtagcatgtaatccctatttttaatggtctcattgtccgcccccaaaaacatcatcattcaaaacgggaagctgttttgaaaagaaaccttcggcataccccgtcccggcttctttgccatacagtctttcccgcgcttccaccatttcgatataaccgttggtcagcggtgtgttcactgactgcgccgtaggaataaactggctttcataggcgtgcaggctttcttttttcagatcgatggtttccgttatgtcgattacaaagtccggacggtgaaacccgttgatcatataatagtatacgcgctgagccttatgagccggcagttcctggtgatctctgtatttatgaattccagccgagaacaccgcttcttcgaccaaagccgccgcattgccgtggtcaggatggcggtctttcggataaggcatgaaaacggttttcggccggcaggctctgatgacactgacaatccggcggatgccgtcctcacttttcaaaagcccgcggtcgggaagcgtaagctggattctctcttttacgccgagaattcgtgccgcctctgccgcttcttcttttcttatccctaccgttccgttggatgatagttcggcctcggtcaaatcgcatatcaccgcggtttttccttgagccgtaaattttgcgatcgtgccgcccataccgatctccacatcatcactatgggcgccgaacgccagaatatcaacgtgttcagacattcggctctcctccgcgcacaagattgcggaaatcaaatgccccgccgtccagcgtccggacgaggatttccgcagttcccatatttgtggcgagcgggatcgcgtatacgtcacacagccggatcagcgccgagacatccggttcgtgaggctgcgcagttaacggatcgcgcaaaaaaatgacgagatccaaggcatttgccgcaatcaatgcgccgatttgctgatctccgccgagcgggccggattggaaacgttcaacggacaatccggtcgcttcctggatttttaagccagtcgtacccgtcgcgtataactcatgatggctcaatatatctttatatgcggtcgtaaactgaaccatatcctgcttttttttatcgtgagcaatcaaagcaattttcatttgattttctcccccttgccgattcagtcgataatattttcgagtccgtatacaagctggtcgattttcatcacttgctccactgacagcttcactcctgacataaaggaagcccggttataggagtcatggcgcagtttcagcgtctggccgtccatgccgaacatgacttcttggtgggcgataaggcccggcagacgcacgctgtgaaggcggatgccgtttaattcagcaccgcgggcgcccggcagaatttctttttcatcaggatggccctgctgcttttctgtacggacgcttgagatcatttccgctgttttcagcgccgttccgctcggtgcatccagcttttgatcatgatgaagctcaatgatttctacatcttcaaaatagttggcggccatttgtgagaacttcatcatcagcaccgcgcccaatgcaaagttcggagcgatgatggcgccgattcctttttcttcagtcaaggcttgaagctcctctaaatccgcttcagaaaatccggtcgttcccacaacggggcggacgccgtgttcaagagcggctttcgtatgttttttgccgatttcaggcgttgtcaaatcgatcagcacatccggttttgtttcttggaaacatgcgcggatatccgtataaataagagcgtcagaatcagcagacatcacttcccgcaatgtttgctgatcgtatgtatggtcaatggcgccgacaagctcaaaatgaggcgtgcggacggcaagttttacggcctcctggcccattctgcctctcggtccggcaatgacgactttaatggtttcatttgacatggtttctcctactttccttcttcttttctagtccagcggtctttatcacgtgtattaaatttatgcatgacgcggttatgagcttcctccaatgaaatatcaagggagttggcgaggcagatcaggacgaacagcacatcgcccatttcctcttccatgcttttctcattttccgtcgttttcttcggcttttccccataataatggttgacttctcttgcaagttcgcccagttcttccgtgagacgggccatcatggcaagcgggctgaaatagccttctttgaattggccgatatattcatcgacctcagcttgtaagtctttcatcgttttgtcactcactgtgcgaatacctcctgtcatctcttccatgttagctaattcaagtacatttgacaaatgttaaaaacggcagtttgctgttttcttttgtatccactataatatttacgcaatcttatggaaggaaaaggggtttgatgcaatgcttggagaaatcagaatcaaaaacatttgctttattttaatcggcgccgctgttttttcattcggactggttcactttaatatgcagaacaatttggcggaaggcggatttaccggcattacgctgcttttatatgcgttattccacatcagcccttctatttccaacctggtattgaacattcctatctttttcatcggctggcgtatgctcggccggacgatgtttgtctataccctgatcggcaccgtctctctttctgtttttctgagtgtttttcagcgttacgaaattcatatgccgctgtcgcatgatttagcgctggccgccttgttcgccggtgtatttatcggcgcgggtctcggcattatttttaaatacggcggcacgacgggcggggtcgatatcatcgccaggctgatcaacaagtttttcggaatcccgatgggccggacgatgtttgcctttgacgcctgtgtcattctgctttctttgtttacgtatctttcttacaaggaagcgatgtacacgcttgtagccgtttttgtcgctgcgagattgattgattttatccaggaaggcggctatgccgcaaaaggggcaacgattatttcttcgaaaaacgatttgatccagcaaaaaatcattgaagagatggagcgcggcgtcaccgttttaaaaggacagggatcctatacaaaagaagacagggacgttctttactgcgtcgttccgaaaaacgaaattgtgcttttgaaaagcgtcatcacttccgttgacccgcacgcctttgttgcagtaagcgacgttcatgatgtgctcggcgaaggatttacgcttgatgaaaataaaaatccgatcagacgataataaaaaggcggcttttgccgcctttactgtttgtgtttccatttgacaaccggtgattttttctttttcaatcggcgggcgaatgccggactgacattgagcgtctgttcgacgaagcgctgcggcgtcagtgccagccattggtttaaggagacgtcttcgaaacggttgcttttgaaaatttccagaaagcgaagcacggtgtcaccgatattctgaacataatgtcccattgcaaaaggaacatatcctacgtcacctgcttgatagttaaatgtccgcgctcttccctccgccgcaaacaccgtcattttcgcttctcctgaaagatagtactgccactcgtccgtattcggatgccaatgcaattctctcatgcccccgggttcgacttccacgagagctgcggcaatcgtttttgacaccttaaacgtttttgaatcgacaatctttactcttcccccgctggtaacaagaggctcctgccgggaaagcttgtagctgaacggctccaaaacggtgccttccggggaagaaactgctgccttttcaatcgggggaggcggttccagctggaacatgtaacgctctttcttgtgaatgtaggccaagtcatatccgggaacaccgaagttcgcctccagcacgctgcgcggggtatgggcaaaccagtccgttactgaaaaggtgctgttttctgaaaaagagccgtcatcaaagacgagcaaaaactcactgccctgctctaatccttgaatggaatgaggaatgccggaaggaaaataccacagatccccttcacttacgttgtcaataaaattccttccattttgatcgaccgcagttaaacggactcctccgttaatcacatatccccattcggcttctttatgccaatgaagctcccgcacagctcccggcttcagtctcatgttcaccgccgcgatgtttttggataccggcagttccctgaccgtcacctctctggaccatccgccgtcttcaagcctcatatgcgtatcagaaaatgagaatttcaagttttgaaccgttcctgcatccgttgaaggcggaacgagcatgtcaggattctggaagtcacgcgcgaggtttcgcggtccttcgtcagtcgccccttttctgcctctgatcggctgcgggaggtgttttgaagccaattgctggatgagttttttcactgccttagctcctttacagcaatttgtgtttatttagacttaggatactcacgctttttctctttctttttttccgctctgtattttcggtagccgacatatgtcagcgcagtaataatgataccgcctgttgtcagaatgacccagagcagcgaagggtcagcgtcatcccgctccaccttgtcaaaaacccgctttaaatcctgctgcaggagcgtcagacgctcaagctttgttccttttgtcatctgctgaaacccgtcctgctcaatcacctcgatatgtttcgccaccgtatcaagctggccggccgacacatccattgtcaggctgggataaattaaatcatataatgatataaattcattccacttttcattgaaattttcacttccgtttccgctgacatcttcttttaaggcgctgaatgtcgccataatcggtctttcaagcgaaccccacagcggatcggagtggtcttccatcgcatccattaccaacctgaactgggcggctgcccggattttttcggtatctgaggcgtctgcctgttttagaacgcgcactaaatcattgaaacccagagtcacctgcctgacttcggcgccgctcagtgagtttacgtgtgtcatttttttcttaaagtagccaagcacttgcagagcctcatcatactgcgaatgccgcgtcatttggaaaacggtatccgaaaggtcgttcagttccttgagaccgccctcatcttcagctttggcagttgtgatgaaacacataagagcaagtaaaagacagatcgtcagctttcgtttcatagaggtccctcccactccttctctttacagaatatgaggagcgggacaaggttagaccaagattctatcagtgtaagtcaagctttatccgtcttttggaaatcaccaaatagtatgcaaggccgagtgaaaatatgctcagccagaatgtagcatagccgatctcttgcatatagtcattgagcattgagtagcggggcatcatgccgaaaagataatcaatgacatcattatgaagcgtccaaacagcggcagcggcaagatgccataaccggaaccgaaaatacgggctgtataaaacgccttgaacggccatggcaaaatgtgaagcaatcagcatgtacccttcccaaggcatctgccccattttgaccagcacaaagacattcattcctaccgcccacagcccgtattttacaagggttacaagagccagcgcttcaaacagcggcgcgtttcttcccatgagaaatgccagaagcacgaacaggaaaaaaaacgtcgccgtcgggctgtcaggcacaaatatcagaaatcggaacggcgtgtccgcaagctgcggcaaataccaataatagccgtacaccgtaccgataaaattaacggcaagaacaagcagaagcatgccgcgcaaccctaaaagataagaaatccacctcataccatcaactctcagtccgtaaaaagtatgtatcatgcaaaaaaagctgacatccggtcagctcttttcataaaagtatatcctgctattgtctacttcacaatacgttatttcgctgtcgtttcagaaatgaacttcgccagctgatcaagctgtttgtcattccctttaaaaataccggctggcatctgccctttccctttgacggcgatttttttaatttcttccgggctcagcccgttatcgaccagagacggaccggcgcttccgccttgaagattatccccgtgacaggaaatacagccttgttctttaaataccttataaccgtctgattcagtatcaatggcggcttcttttttgattttcccttgctcctccgccttcgcccagtcatgcgtcgcgactgactgccacgttaaaaagaccgtagcgcaaagcgccaaaagcatcatgccgaccgcaaccggacgcttccacggccttctttcagaccccctgtcgagaaacggagccaaaagcagcgacccgaaggcaagacccggtataatcatcgcgccgataacggtgtagctccctgcggcatattcatattttaatagctggtataaaaatagaaaataccaatccggcagcggaatataccctgtatccgtcgggtccgccacccgttccaaaggcggctcgtgcacaatcgttaaaacgagaaatccgacgaggaaaacggccccgaccatccattctttcagcaggaagttcggccaaaacgcctctgtctttccaggatactctgaatagtctttcggtatattcggttttttttcagccggtatccttgaatctcctacaaacttcattcctttcccccggtgcatgtcatcccctcccttttatatcagatttgtattaaagcggtcctgaaattccctgcttgcggatcatgacaaagtgggcgcccatgagcgcaaacaaagcggcagggagaaaaaatacgtgaatcgcaaaaaatctcgtcagcgtttgggcgccgacaatatcgtggtggccggcaagaagagttttcacctgcgctccgatcaatggcgtcgcctccgcaatctgaagacctacctttgtcgcaaacagcgccttcatatcccatggaagcagataccctgtaaaaccgagaccgagcatcacaaaaaagatcagaacaccgacgatccagttcaattcccgaggctttttataagctccctgaaagaaaacccgcagcgtatgtaaaaacatcatcacgatgactaaacttgcgccccaatggtgcataccccttacaatctgcccgaaagcgacttcattctgcaaataatacacagattcccacgcgttttttatatccggcacataatacatcgttaaaaacatcccggacagcacttggataacggttacaaaaaacgtcaaaccgccgaaacaatagacaaaagccgagaaatggtgagcgggatttacatgttccggcacttcatggtcggcgatatcccgccacatcggcgtaatatcgagacgttcatccacccagtcataaattttgttcagcatgtcacccttcccccctaggctttgcttttccaagatacaaaaagccgtcctttactttttgctcataacggtcaagaggcgcgagcggcggcgtgcccggaacgttcgtgccgtctttttcatacagcccgtaatggcagggacaaaagaacttgttcggatttttaggatcattgttccagtttacggtgcagcccaaatgcttacagatcggagaaagcgctataatttcatccccatgcttgtaaacccaggctgacctggattcttccgattcgtaccaggcgtcgacttgatgaattttaaagtcaaaccgcttcggctccttcgtcagctcatccacactgacaacctgcaccattttttgatctcccgtcggttttaataccgggtccagcgcaaaacggaccatgggcataagcgcactggcggccataaatccccccacgccggtgagcgcatagtttaaaaattgtcttcttgatatatcttgttttccgcccatctcttccccccctaaagattgaccaaaaattaactaaaatagaaaataattctgagatttgacaccctcataatatatgaatctttcagcaaggtcaacagaggcaaaacgggtgttttgcgggatgcctggtgtttttaagaattgttccacttctgtaacaaaacgttcaaaatttctccgcacttgtcatccgcaatttttctctttaaagagtctttcatatgttcaaacggaacggcaggtatgtatatgacatcagaccctatttcagaatccttccatttttcgtctgccgtcagaaacaaggcgtgccggaagttggtcatcacctcttctttgagtttttgaagcagggcgatttgtgattggtctatatcaacatatgtataagaggggaataaatatacccgtcccttcaattggcgctcaagctcttcagaaagcaattgagtgctttccccctgttcaacggcctcttttaagcctcctgaagacgttatggaaattaacggaatgacagcggtatcaatgtaatccgcagattgtatataggcatcggcatcagcggccctccatctcatgtcccgttcctcctctttacgcaacaagccttgcatattctgcaaggctgtcatttatgtgagctgattcaattggcgggaaagcttttcaaatgtttctttgtcgtggcggtccagcgcctcgtcgatatctttaagcagcttttcccgctggaaagtggaaatggcatgttctaatattttttcggccatcccctgatcctgtttattttcaaacaggtctttcggcagatgcggatttgattcaagaacagcggcatattccggtgagctgtaggccgaacggaaattcagctggataaataaatcctgctgtttatttaaccggatgtcgtgaaaagatttttccgcgtccgtagtcatgacattttctttataaaacctaaacggcacctcatcaacgcaatgagtagacatgataatgcctctcgggcaaaattcggcttgttctacaaaatggactttttccattaatgaatcatgactcattaaataatttaaaatccagacgcactcccggcgtttaagctgataatgatttaaaaaccaacggataaaatcctttttttcattgacagaaacaggggtctgcatgtaattccctcctctatcgatcgtataatctgacatcacttatacattcagcaagcatggtccaaaatcctgcttatcttaaaaattcatcctctatccgtaagattgtttcttcaagctcttcgtttgttccatccattgaaagcacttgttttaaaagcggcagcgcttctttctggagaccctcttccaataagaagtgagcgtattcatataagaaatcccgatcatcctgataatggagatacgcagcttcgaagctttttttcgcttcagcgtattgctcaaggcctgtataggcacccgccaaataccaattgtatttcggatcttcttctccgtagccgcggacttccttaatcagatcaataatctcttcaaagctttcttctttatgatagacggctaaaagcgtatggagcgcttccacgtaacccggatcgagcgccagcgcttcctgaagaagctttttgccttcctcttcgttgccgagctttaacgccattttcgccgcatagagaaaaagctctttattgtattcatcgtaagtaataccttctttagcggtttttaatgcatcttcatacatgccttctgcctcatagctttttgcaagcggcatataaagcgatgaataggaaggatcaagcccttttaaatcagacagctgcttgatggctgttttgaccattcccgcctgataggctgtgaacccgtacccgaaaatcgtattcggttctgtatgttctgccgccgctttttcataccatgaaatcgcttcctcaaattcacccgccgcgctcaatgactcagccagcctctgatgaacatttacgccgccgatttcgtgccgttcttttgccgtctcttcatagtaaggaacggcttttgcgtatgacccctgagtgaagtataattcccccagagcgaaatcaataacaggttcatcttgtaacatcgttttcgcctgtaacagcttttgctcacttacttcaaataagccctgcatctgatacagatcagccattaaaagaaggctttccgcgtaagacgggtcttccggagaaattgtctccagcacctcaagagctttttcttcttcatcaatatctattaacaattcggcgtaaaaattcgtcagctcagactcatccggataaaggtcatgcagatcactgatcagcgctaatgctttttcggcgtttccccattcatagtagagctgggctgcaatggctttgtcttcgtcatgaagctgcgtttcagcttttgaaagcgctttgagtcccttttcggtttcacctgcttcaactaattttatggcttcttgaatcaatgtattcaaatcagaccggtcctttcttttcctatacctcatcaaccaatgaaaagggtttttattcgggttattcttatcataattcagacagggcctgcccgcaaataagatgcttcacccggcattatagtttatcagaaaatggttaagaggaaaacggcaaaaagggggacggcatctttatacgcaaacagcgcaatttgttccggctgtttctgtaacgaaaacgcattccccctttcttttatttttctgtttaagacaagctatgtcaaagcccaaagttttatgacacatgaagaaaaaagcccgaagaatcgtcttcaggcttttttggctaattgatctaaatgctcaaaaaatgtcggatatgagacatggatcgcctcagtatcacggatgtcaatcggctcttttgtaaggcacgaagcgataccgagcatcatgccgatgcggtggtcgccgtggcttgacacatcggctccgcccgcaagcatttttttgccgtgtattttcatgccgtcttcagtcggttcaatgtctgcgccgattttccggagctctgatacgacggtgtcgatccggttcgtttccttcaccttcagctccgcagcgtctttaatgacagttgtgccttcagcctgcgttgccaaaagggcgataatcgggatctcgtcaattaaacggggaatgatttctccgccgatttctgccgctttcagatctgaagtttcaataaccaggtctccataaggctcagcgctgtccgcttctgaaggaatcacttcaagtgaagcccccatttgctttaagacatcaagtattcccgtgcgtgtcgggttcaggccgacgtttttcagcacaatccggcttccgggaacgacagcacctgccgcgaggaaaaaggccgctgaagaaatatcgccgggcacgaaaatatcagctccccgaagcttctgaccgcccgttacggaagcgctcgtctccgtttccgcaagctcggcgccaaaagcgttcagcatccgttccgtatggtctctcgatttatgaggctcagtgacggtcgtcgtcccttctgcctgcaatccggcaagcagcacggcggatttgatctgcgcgcttgcaacaggggagacgtaatcaatgcctttcaattgtccgcctcttacggataaaggcgtaaatcctccgtccgctcttccgtcaatcgcggctcccatctgttttaaaggctccgtcaccctcttcatcgggcgctttgcaatactttcgtcgcccgctaccgtactgtgaaatgggcgtccggctaaaatgccgagcatcaggcggatggtcgtgccggaatttccgacatcaagaaggctgtcaggctcagaaagtgcgtcaatgccctttccgtatatctttacatcacttccgttttgttcaatggagacacccatttttctgaagcaggcaatggtgctcagacaatcggctccgggcaaaaagttttttaccgttgtcgttccttccgcaagcgctccgaacataacagaacggtgggagatggatttatcccctggaatatgaatttcaccgtttaaagacgtcactttttctcttttcaatgttttccacctcagtcagcgtaaaatgtgtcatatttggcgcgggattgaatgcaggtttccgcgcgcttccggtcatcatcagtctggaaactgattctgagaattccgttaatatcttctcttgtttcgataatgcggatgttggtgatactgatttgttcttctgccaatatcgccgtaatttccgaaatgacccccggatgatcgggaacatcgacataaaggtcataaaaggatgggatcgctcctttttgacggagcggcagaccgtcgcgataatctttcgcttttttaaaatatccgaacaggctgtccgcatcttcattttctacataagattcgatcgtgtcaatctcccgtttccattctttgaagcggtcaagcagtttatctttgttatgaagaagtatgtccctccacatcgccggactgcttgaggcgatcctggtgatgtcccgaaaaccgccggctgcgaaacgtttcaaaaacggataatcttcttcagcatgatgagcctgatgtacgaggcttgcagcaacgatatgagggaaatggctgatgacgctcgttacgccgtcatgctcctcgggagtcatctccacaaagtgggcgtttgccgctttcaagagttccttcagatgcgttactgactctttagaagttgattttccgggtgttaaaatgtaaaacgcattttcgaataaaaattctttcgcggcagcggccccggatttatgagatcccgccatcggatggccgccgacaaattgatagtgagccggaagcactttgtcagcgtagctgacgactttctgtttcgtgctgcccacatccgtaatcaggagttcatgggtgatgtctgatgcggccagcacatcgagcattttcagcgtttgggcgacaggcgtggcgataatgacaacagacgcttgctgcgccccttccgtaaatgagccggcccgctcgtcaataattccgagcttcagcgcggcagtgagctgttcttccgaaatatccacaccgataatccgtttatgcggatgctcctttttgatggccaatgcgatcgatccgccgatcagcccgatccccgcaagcaatatagtatccttcatttcactcatttcctttttcaactattttaatagagcaaagaggtgatgcctgatcacctcttataatatttcagctaaaattgtgagaatttcctcattctgctcttgcgtaccgaccgtaatccttaacgctgtcggaaatccgagcgcctgtcctgagcggacgatatatcctttttccaacagggcttggaacagttcatccgccgggcggttaaaatcaatgagcacaaagttggtttgtgaaggataacaagttaatccgagagtttctgcaaaatcataatactgcttaaggcctgctttatttttctcgacgcattcctgaataaatgtctggtcatcaagcgctgccagtgccgaagcctgaccgattctgctcgtattgaacggctctctcgccggttcaatctggcggatcagcgcttcgtccgcaatgccgtatccgacgcgcagcgcggcaagtccgtacgctttagagaaggtgcggaggatcataacattcggatattgctttacaagcggaatgctttctgggtaatcttccgccgtaacatactcgtagtacgcttcatcaagtacaacgagtatatgctcgggaactctgtttaaaaaggcaattagctcttgttcagaagtatatgtccccgtcggattattggggttgcatacccatatgactttcgtctcgccgtcaattgcttccagcatccggtccaaatcatgagcgccgtcactgcggagcggcacctcgcgcacctcagcgccttcaatcaccgcattgtgtctgtattgcgggaaagtcggggcggcggtaatcgtgtttgcctgatcatttaataaagaacggcagataatctgcactagctcatcagagccgttgccgaaaatgatcgaagattcactgacctgcagatgctcactgagccgcgttctcaaggcggcactgtaaccatcgggatacagcgcaagctgctcaatctcctgatgaagcgcatctttagcggcctgtgaacagccgaacggattttcgttagaagcgagttttactactttctcaagcccgtattccattttcacttcttctattggtttgcccggctgatacggtttcagctgccgcagctgttcttttatctgcaaatccagtcacctcattttacactgtacagtcgtccgaacgtctttgcgtattcttcaaattcaagaagcgcatcagctcttgttccgggattcacaagctttattttaagctcttcaacttttttgacaagcgcgctgccgacaacaacaccgtcagatatttcattcatcctgtcaacctgtttgcggttcgagatgccaaaaccgaccgccaccggaacagagctgaattctttcaccttacggatgaaagagtatacagacggatcgaattcgctgcgtacgcccgtcactcctaaagaggatacacaatacacaaagccgcaggcctgttcagtaattattttcaaacggtcttcacttgtcggcgcaaccagtgagatataagcgatattctcctttttgcatgtcatttgcaaaagggagctttcctctaatggaaggtcgggtacaagcagaccgtctatgtcgttttcccgcagtaaagcgaaaaagcattctttttctaattgtaacacaggattgtaatacgtaaagaggataattggaatatgaacgccgttttttttcattttgccgccaagttcaattgcttttacgatattcattccgttttccagagcccgttttgaagcccgttgtatgacgggtccgtccgcaagcggatctgtgtaaggaacgccgatttcaagggcagaagcgcctgcgttctgcaatgatattgccagttcaacagaaatgtcaggaagcggatcgcccgctgtgataaaagggataaataatttttcagactctcgcagattaaacatgtgtctccaccccgttttccaaaacattcatcagcgtatgaacgtctttatctcctcttcccgataaactgacgagaatgattttatctttatccatgtcttttgccatttcaaacgcttttgccagggcgtgggcagattcaatagccggaagaataccttctgtttcagaaagcagacgtaacgcggcaatcgcttcttcgtctgtcacgctttcgtacgttacacggccgcttttatgcagataggcgtgctcagggccgatccccgggtaatcaaggcctgctgaaatggaatacggttcgataatctgcccgtatttatcttgtattaaataggtcattgatccgtgaatcaccccgagcgtcccttttgcgatcgttgccgcatgcagcggcgtatcaattccttttccggccgcctcggcgccgatcagctcagtatcttcgtctaaaaaggcctgaaaaatgcccatcgcattgcttccgccgccgacacatgcaacaatcttatccgggagcgttccttcaacccggcggagctgttctttcgcttcctctccgatgattttctgaaattcgcgaacgatatacggatacggatgcggccccactacagaaccgataaggtagaaatgatcttcacaatgctggacccaatacctgatcgcctcattcgtcgcatctttcagcgtgccgttgccgcttgtgaccggcaccacttccgcgccgagcagtttcatccggaatacgttcagcgactggcgcgcaacgtcttcttcacccataaaaaccgtacatttaaaaccgaattttgcggcggctgtcgcggcagccacaccgtgctgtcccgcgccggtttcggcgatgattttcgttttgcccatctttttagcaagcagaatctggcctaacgcgttgttaattttatgagagccggtatggtttaaatcttctcttttcagatagattttcgcccctcccaaatactctgacaccctgtctgcgaacgttaatgcagtcggtcttccggagtaatcaaacaatagctttttatattcggcatgaaaaacgggatcattctttaattctttgaaagccgtttcgatttcctcaaggggccgcatcaatgtttcagggacaaatttgccgccgaattcgccgtatcttccgatttcatttggatatggatacatagtggttcatcctttcttctagtagccggatcagtgtttgatccttttgtccgtttttttcaattccgctggcaagatctataccgcacggacgcgatctcagtaagccggtaatcgtttcaggattaacgccgcccgcgataaaacagcgcttgtttgcattttgagcctgctttcggtacaaggggacacgggcccatgaaaacgcgattcccgtgccgcctctcattccttttactgaagaatcaatgacatagccgtcgacagcaggtgcaaattgagccatctgacgaagcgtcccttccccgtgatggagcgctttccatatctccgagcgcacaagcggacggagacggagggcatcctcaggcgattcatcaccgtgaagctggatggcgtcaagtgccagatcagaggcgatttgcgcgatgttttctatcgtttcatttacaaatactccgacatgtttcttgtctgtccggacctgctctttccatttccggacctcatccggcgttactctccgtttgcttgcggcaaaaataaatcccagataatccgctcctgaagctgccgcaagttcgtaatcacgcttcgatcgtattccgcagtactttacatcaggctttttcatatcgtcactccccgaacagtccgcggatcgccttttgctgcgaatcctctctcattaaggattctccgaccaatacagcctgcgccccgtgcttgttgacgaattgcaggtcagccaaagaaccgatgccgctttcgctgaccagcaggcagccgtccggtacaagctgcgctattttttccgtttgcgaaacagaagtacggaacgtttttaagtcccggttgtttatgccgagaatatccggctgaaacacttgtaaaatccgttcaagcacagtttcatcatggacttcaacgagaacgtccatgcccttctcgcgggcttccagataaagctcatgaagctctgaaggttccagcgcttccccgatcagcaaaatggcatcggcgccgatcctgaacgattcctccacctgaagggaatcaataataaaatcttttctcagcacgggaagagacacggtttgtttaacatctgtcagaaattgatttctcccctgaaaaaaacgggtatccgtgagaaccgaaagggcgtcggctttagccgcttcataatccgccgcaatcgtttccggaacaaattgctctttaatcaatcctttagacggcgaagcttttttcacttcggcgatcagcccgataaaacggttcgggttcaggagcgcttttttaaaggatctccgttcaatttgacaggtttccggcagcacgatggatttgatttcttcttttttctgctgaatgatttgatcaagcatacatttcttcctctttctgtttcagacgttcgagctgccttttggcatctccgttttgaatcgcttctaaggcggttttcgttccttctttcagatcgtttgcaagacctgccgtataaatggccgcgcccgcatttaaggcggtaatatgcagagcggatgacggagcttcatttgcaaaaatattctgaatgaggagcgcgctttcttccgatgaactcacttgaatatcctttagtgaaccttctgcaaaaccgaattgttcaggtgaaacggaatattccagacgttcaccgtttttcagttcaataatatcggtcggtgctgtgatggacagttcatctaatccgtcacgggccgacacaagcatgacgtgtctgacatcaaattgttccaacgcgcttgccatcaggcgcgctttatctaatgaatagacgccgatcacctgccgcttcacctgcagcgggttgctgagcgggcccagcagattaaatacggttcggaagccaagctcttttcttgcggcggcgacgtgcttcattgacgaatgaaacaacggcgcaaacaaaaaccccatttgtttcatttcaatgctgcgtttaacgctttctggagtggcttgaatggaaacccccagcttttccagcacatccgcgctgccgcttttagacgaaacggagcgatttccgtgcttggcaactttagctccggcggcagaagctgtaattgccgctgccgtggatatgttaaacgtagaaatcccgtctccgcctgttccgcacgtatcaacgacatccgccaagccacctgatgtctgtgcccgcgcccgcatcacttttacaaatccggcaagctcctccgccgtttcacctcggtgggctaacaccgataaaatcccgccgatctcagactgcgacatgtccccgttcatcatcatctccatcagcttttcggcttctccggttttcagcgtacggccattaacgcacgattgcagaaatttgttcatccgtcttctcctccccgccagaaaagatgtcttctgcaatttgaatcgtttttaaaagcgcccccgctttgttacagctctcttcatattcggcttccgggacggaatcggcgactattcccgcgcccgcctgcaccgacgccgtaccgtttttgacactcatggtgcggatggtaatacacgaatcaattgacccgtcaaatccgatataagcgatacatccgccgtaggtttctctggaagtcggttctaattcatttaaaagctgcatcgcgcggatttttggagcgcccgtgagtgttcctgccgggaatgccgacatcagcgcgtcaacgggatggacgccctgctttaaacggccggttacaacagagatgatgtgcatcacatgtgaaaaagaaacgacctttgtgaattccggaacggctacggaaccgtactccgcaactctgccgatgtcattgcgcgcaagatcgacgagcatgtaatgttcagctttttctttttcgtcattcatcagctcttttttcaggcgttcatcctcttcttttccggcgccccttcttctcgttccggcaatcggatgaatttccaggtgcctgtcatgcacgcggatcagacgttcaggcgaactcccgacaatgtctctgtcaggcagtttgatatagtacatataaggtgaaggattgacgatgcggagcaccctgtacagctcaaatgaatgtctggataccggaatgtcaaacttttgcgaaagcaccccttgaaaaatgtctcccgcttttatatattctttcagtttattaacgccggccataaactcttctttcgtataattggatgtcacagcggcaaaacttggcgtgtcaaacgtttctttagaaaaaaacggctctttcatatctttcgattctgtcaaaataccgataagcttacgaagctccgcgcaattttctttaaaaacggcccgcttttcttcctccgtctcccggccgttaagctccgcatattgaatgaaatgcacttgtttcgtttcgtggtcgtacgcgatgattttccggcagacaaacagcatacatttttcgaaatctgttactttcgcgtggcttggcacggaaggctcaatcaaaggaatcatgtcatagctcagataaccgaccgcccctcccgaaaatgggatatcaagctcgggtgttttaatgcggaagctctcattcatccagtcaagcacggcttttaattctccggcttcaaacagcgtatgcccgtttggatcagcggcagtgaatgtgttatgactctctttaatggtgataaaaggatcaaggccgataaaagagtatctcgaccagcttgacgactcatccttgctttctaaaagatacgtaatgtttctgtccagtttttcaaccatctgaatgggtgtgatcgtgtcgaccgtaaaagtctctgcgattggaatggtgcggtgtgtcagactgtcctttaaaaataaagaaacatccgattgtaaattcatgattctcctccttacggtaaggagaatgagatgaagagtgagaggagtcttgcgtataagaaataaacccaaaagaaaggcttcttttgggcagaataaaaacgtgtttatctcagctcagctaaactcattctctgctaccctattctaaactcaactgttcaatgtcttacttaccagctctatacacactcttgtgtatttctaagctttgtttatcgtattacatgtcagtattttttgtcaatgataaatccggccttaacacaacggctttttctaaatagacatgcttgatttcatcctgaggcgtatccgtctgaaccgtcatcaggacacggatacacttttgcagagccccggtgacatccatttcctgcatgcacgtcaccgggacgtactgccacccggaaaggcggcggaccgcttttgccggaaatacggaatggatatcaggcgtggcggataacaggatctgtacaacgtcttccggcttgcatccattttgttcaatgattttttcaagcagctgctgtgttttttctaaaatttcttgttcggtgtcttgttccaccgttgttgctccgcgaatgccgcgtatcatcatgctgtttcctccattcgccatttattcagcaaattttcgagctcatcttttgaaagcatgcagtcccgcgcttcgcctaattcttttaacacgatgaactgtgtcatgcctccgcgcgtttttttatcattcatcatccgggcggagagaaccggcgtttcaatatcttgtctgatgcttcccgggtagccgagcccaatcagccattgtgtgagttctttcctgttcatcttgcaacccgcaacctgttcactcacgtaaagggcaaactgcatgccgagggcgaccgcatctccatgtgtaatccgtccgtagccgtattccgcctcaacggcatggccgagcgtatggccgaaattcagaaaagctcttatcccctcttccttttcgtcctcacgcacgacggccgatttgattgaaattcctttataaatcatttcattcagctcagcgcttgtcagtccttgcaacgtgtcaaacgtgagaagtttttctaaaaaagcatgatcggcgataaacgcgtgtttgatcacttcagccatgcccgatctcagctcttgttccggcagggttttcagaagctccgtatcgtaaatcaccgctttcggctgataaaacgcgccgattaagttctttccgagtttatggttgacggccaccttgccgccgaccgcgctgtcatgggcaagcagtgttgtcggcatttgaatgaaatcaattccgcgcataaaagttgctgcgcaaaagccggccaaatcacccgtcacgccgcctccgaaggcaatcatacatgaggagcggtccatatggaaagcgatcgcttccgtttgaatccgttcatactcttttagagatttcgcttcttctccgcttggaacgatcacctttttcacgggccatgtttcgtttaaaagccggaacatctcatcaccgtaaagccggtcaacttcagcatcgatgatgagaaggatctttgtcagcggcctgttcagtgaagacaaaagggcagcggcctgtttccttatgccttcaccgatatacacgggatatgcggaggaagctgtccgaacctcaagctctttcatcagaattccctcgatagttttttcatgtcttcaacattttctttaatgcggtcgatctggtcaagcccgaattgttcgacgactgcatttgcgatttcccaggccactgctgcttcagccactacgcttgctgccggaaccgcgcagctgtctgaacgttcaatgctcgctgtaaacggttctttcgtttcaatgtcgacgcttttcagcggcttgtacaaagtagggatcggtttcataacgccgcggacgacaatcggcattcccgtcgtcataccgccttctaatcctccgagcctgtttgtggcgcgtgtatagcctttctcttcatcccatacgatttcatcatgaacttcactgccgtttttgccggccgcttcaaaaccgatgccgaactctacgcctttaaacgcgttaatcgacagaacggcagcagcgagcttgctgtccagcttacggtcatagtggacatagcttccgacaccgaccggcataccttcgacgatcacttcaacgattccgccgatcgagtcgccgtttgccttcgcttcatcaatggctgccatcatttgacggcctgcttcttcatcgtagcatctgaccggtgattcttccgttacccgtttgagatcctcaatggatgtgtaatcggttttctctgcttttacgctgccgatttgcaggacatgcccggcgactttaatgccaagctccgctaaaatctttttagcgacggctccggcagccacgcgaaccgttgtctcacgcgcggaagatcgttctaacacatttctcatatcacggtgattatacttaatagcaccgttcaaatctgcgtgccccggtctcggtcttgaaatctggcgtttcatttcactttcttcttcttctgtaatcggtgcggcgcccataatttttgtccagtgggtccagtctttattttctacaacgagcgcgatcggtgaaccgagtgtccgggcatgccgcacgccgcttgtgatcttcgctctgtccgtttcaatctgcatgcggcgtccgcggccgtgccctttttgacgtctggcaagctcaaaattaatgtcttcttcagttatataaagccccgcaggcacaccttctataattgtcgtcagctgcggaccgtgtgattctccggctgttaagtatctcatttctttcttctcccttcatcgcattaacgcttttaagtaaaactataccacaagttttcattaaatgtcttctatcttttttgataaaaaaatgtatcagtgctctcaaggccgaaattttccgggctgaaaatttgttctgtactgccgacaaacagaattccgttctttttcagactgcccgccattttcacatacagctcttcttttgctttttcagtaaaataaataaagacgttgcggcagacgatcagatcaaaatcctgttcatagctgtcggcaagcaggttgtgccgcttaaaccggatgttgttctgaatctcttgttttacttgataactgttgtcagcctgcttggtgaaataacggcttttcacggaagccggcacctcttgcagcgagcgttcctggtagatgccccgcttggctttgcttagcgccttttcatcaatatctgtcgccaatatatcaaatccggccagtcccgtctgctgattgagaatcatagccaaagtatagggctcctctcccgttgaacaggccgcactccatatttttaacggtttgttatgctttattaacggaagaattgaggtttcaagaacttcccaccgtttataatttcggtaaaattcagaaacattgatcgtcattctgtccaatgtttcgtttaataaaagcttgtccttttccaaagcggcggcaaattcctgaaaatctctgaaccccttcttttcataaagggacgtcagccgccttttcatctgtgcttctttgtataaagataaatcaacgccggttatttgtttccacttggtgataaaaatgtcgtaaggctccattgcttctctcccaatctcgctgtcttttgtcctagtatagcctgttttctgtcgaaattgtacgatttcaataaaaaaatcagcccgcgggctgatttgtgagaaacgaaaagacagggcagcgcagcctctgtctttcataaatgatgtaaaccttttcataatacgagaaaaagaaaggctgacggtttagtacacccagtcggccattaatttttgatacggtacaagctcttcctgtttaaagaaaatgtgaatttcccgctcagcgctttctaaggagtctgaaccgtgaatgatatttttgccgacaaacatgccgtagtcaccgcggattgtgcccggcagtgcatctttcgggttcgtttttccgatcagctgtcttgtgatctctactacattttccccttcccataccattgcaaatacgggtcctgatgtaatgaattccacaagctcgccgaaaaacggcttccctttatgttcagcataatggttttcagccatctgttctgaaacttgcattagcttggctcctgccaattgtaagcccttacgctcaaatctggataaaatctctccgatcagctggcgctgtacgccgtccggttttaccatgataaaagttttttccataagattctccaccccatcattatgtataggctttcaagttgcacaccgaaatcgtaacatctttctgacaattaatcaatccagggcggagaatgttcacatcttgttcgtaaaaaggaatttaaaatttccgtttgccgatatatttggcgatggcggccaatgatgagcgcgcacgtcctctcggcagtgtattcagtttttcaaacgctttttttaagtacctgtcactaacggccattgatttttcaatcgcgtctgtgcgtttaatattttcaataatgggggcgagctgctcctgtgttgtttcactgttaattaatttcagctgatttttcaattcaggctgacggagcgcgtacaaaacgggcagagtgacatttccttgcagcagatcccctccgaccggttttcccagttcctcttccgttgaagtgaaatcaagaatgtcgtcaataatctgataggacatgcccacgtaataaccgaaccaatataatgctttgtgaatcttctcatcagctcccgaagcgatggcgccgagctggcagctgacggcaatgagaagagccgttttccgtttgatgcggcgcaaataggttctgaggttttgttccatattgtatttatctctgatctgttcaatttctccgaggcatacttctacgatggttttggacaggattcggtgggctttcggctcatccaatctcgtcatcatctcaagtgagcccgcaagcatataatcaccggtatacatggcgatgcggttgtcccacttggctttgatggtcggttttcccctccgcagctcagcgtcatcaatgacgtcgtcatgcacgagggacgccatatgaatcatttccagcgtcaccgcaacatattttattttattaatgtcatagtcgccgaacatgccggaaagcaatacgaaaacagggcggatccgcttgccgcccgcctggagcaggtggagcccggcttcactcagcaaaggatagtctgaccgcaccgtttgctcaagctccctttcgatcacatcaatatcgtcatttaaaaaagaataggccattttaaatttcatatcattcacccaaacatctgtatattcatcatttccaaccgatatgcgtagcggccactccgccggtaaacgaatggtatttgacattcgtcaggcccgcttcttcaaacagacgcgcaagttctttcataccgggaaattctcttgccgattcttgaagccaagaatattctttatagctcttcgcaaacatttttccgaagaaaggcatgatgtatttaaaataaagaaaatatgcctgtctgaatccgaacatttccggctgggatgtttccagacatacgacctgcccgcccggtttgacgacccgccgcatttctttcagcacggtcagatagtcgggaacgttccgcagcccgaagccgatggtgacaaaatcaaaagaatcatcagcgaaaggaagctccatcgcatttccgtgcaaaagctcaatttggctgtaaccgccctctttcacttttttctcaccgatgctcagcatatttttgctgaaatccagtcctttgatttcgccgctttttccggccgcttctgcgagggcaatcgtccagtcagccgttccgcaacagacatcaagcgcttttgcgccttcttttacattcatgatctgcatcgttttatcgcgccattttttatgctgctgaaaactgatgacagagttcatttggtcataatttttatagattttttcaaacacgccgtgtacgcgctgttcttttgactcctgcatgttgattacccttcttccactttctgatgatatgttttgtcctggctgatcgctttaagccggttcagcatgaggttttggattggtgaattgagcggcagcagcgtttcaatgctttgctttgcctttcggaagctatcttccattatgtcagcctttgatttccctgactttacaatattgccgatgacatcgagaaatatagcattgccgttcatcagccgcttatatacaaaaaaatcactcgccagctctttccagcgcggaagattaaagtggtctgacactctgtgaaacagggccgcttccacaatcgccatgctttcgatcaattgattcaagtcattgacagaccgatcgtacagacggattttatgctcattgatttctttaattgccgtagcgagcgtccgaatcatatagatatccttcatttcagataaaagcgaataatacagtccgctgaaatagtcgccggcaagcacggtgagctgccggtttttattttcgtctcgctttaacgctctggctgttgtcacttcatcgtgggtatcaagggcgctttggacaagcatcgcagttactatgtaattttctctgtcgttgttcttaatgtccgcctcttcaaacaaagcgtgaaaaagaagaagcttatcctcatcgattttaggcgcagaaatatgtttcgctaaataaggatgagacagcttttgttttaatttcgtatttagattcgctaaagttccgtagatgtcttgcaaaaatatcacccttgtccccaaattcacatttattctaatatgtatgagatttactcgtcattattatacgcaggtatcattatagcataaaaaaaagaaattggctgtattctcccgccgtttgcgggcatttggcaaaagcgggaaacagccggcttattttttttcgctgttcatttctccgtaagcggtctggatgagggcgttgcctctcactttgatggcagaggtatgctcagtaaactgagcgataatcacttcgcctttgtccagtttttcggaatggtgaaatttcgtatccgttcctctcgttaaaccgatgacgttcacgccgtcctcgaccgctttaatgacgacaaaatcacttgaatgctttgaattcatatctgcaccctctatcattattaatccgcacgtttaatatgttctaacacttcggaacgcgccgctgcgtcatctttaaaaatacctcttacagcggaagtcactgtttttgcacctggctttcttacgcccctcattgtcatgcacatatgctcagcctcgacgacaaccatgacgccgtggggatctaaggtctctacgatgctttctgcaatcgttgaagtgatgcgctcctgcagctgcgggcgttttgagacggcttccaccgcccgcgccaatttactcaggcccgtcactttgccgccgcgcggaatgtaggcaatatgcgcttttccgtaaaaaggaacaaggtgatgttcacacatggaatgaaacgcgatatcttttacaagaacaagctcctcatggtcttctccgaaaacggttttaaagtgttctttcgggtcttcatttaatcccgagaatacttccgcgtacattttcgccacgcgtttcggcgtatctaaaagcccttcccggtccgggtcttctccaatcgcctctaaaatctggcgaaccgcctgttcaatctgttctttattaacttctttcattgtctgtgtcctccaccattgaatacatttaatttcgattctagcacatttgccgcgccaaaagcaaaacgaaagtcctgcccggtgaccgaggctgcttaaatatgaaaagcccctttatcaaggggcttttctgtgaagaaacaaagtgtatgtatcagatgcatacacgatctatattcacaattattttcctgcaacagcgtctttaagagctttacctggtttgaaagcaggtaccttgcttgcagggatttcgatttcttcaccagtttgcgggttacgtcctttacgtgcagagcgctcgcgcacctcaaagttaccgaaaccgatcagttggattttatcaccgtttttaagtgcatctaaaatcgtatcaaaaacagaatcaactgcttttgtagcgtcttttttagacaattcgcttgcttcagcaaccgcattgattagttctgtcttgttcatgcctttcacctcctcccaaaagggtatcaaatcagcagtttattatcatttcttcacagttcagcctgattctaaacctgtctgataaaaaatcaaagcagggaagaacagacaagtaaacggcttttcaaaagaaaacagacactttgaggaatgtttgtccaacaaagtgaagattttctgtctgtagagtaacacatataaaaagccatatcaagcattttaaagcctcaatcccttgctcgtcaaggttttcacgtgttttatcgaacaaatattcctttttttgcttttttcctcctaatccttgattgatttccagtatctaaaaagaataaaaaaagaccccccgtttcaggaagaggtccttcagcttacaaaataatggcgatcaggccgcctgagccttcgttaataattctctccagcgtttctttcaatttatatctcgcattttccggcatgagtgacagttttgcggagattccttctcttacgatagagctcaatgatctgccgaaaatatcggagttccagatagaaagcggatcatcttcaaagtcctgcattaagtaacggacaagttcttcactttgtttttccgtcccgatgatcggcgcgaattcactttccacatccactttgatcatatgaatggacggagcgaccgctttgagccttactccgaatcttgatccctgtctgatgatttccggttcatcaaggctcatatcggctaaggccggggcggcaatgccgtagccggtctgtttcaccattttcagcgcatctgatacctgatcatattcttttttcgcgtgggcgaagtcctgcattaattcaagcaggtggtctttcccgcggatttcaacgccgaccacttcttttaaaatctggtcatataaatgatccggcgcatacaaatcaatttctgcgacaccctggccaagttcgattccggccaatccggcgctttcaataaactcaaattcactgaagtgtccgacaacccggtcgacatcgcgcaggcgtttaatatcttttacggtttctttcactgattcctggtagctctctctgagccagtgattttctttcagcaccatgacccagctcggaaggttgacattgacttccagcacagggaactcgtaaagcgcttctctgaggacgcttaacacatctgtttcccgcatgctttcaacactcatggcgaggacgggaatatcatatttcgcgcttaattcagctctgagcgcttctgtttccgggtggtacggttttaccgagttgataaccataataaacggtttgccgacttccttcagctcgtcgatgactctttcttccgcttccacgtaatcgccccgcgcaatatcgccgattgagccgtctgtcgtaatgacgaccccgattgtggagtgttcctggatgacttttctcgtaccgatttccgctgcctcatgaaagggaatcggttcttcgtaccaaggtgtattgatcattctcgggccgttttcatcctcatatcccttcgccccgggaaccgtatatcccacacaatccacaagacggatgttgacatcaagtccttccgcgacatgaacggacatggcttgattcgggacaaattttggttctgtggtcattatcgtttttcctgctgcgctttgcggaagctcatcctgcgcccgcgctcggtcggcctcattgctgatattcgggagcaccacgagctccataaattttttaatgaatgtagatttccctgtacggacagcgccaacgactcctaagtatatatcgccccctgttcgttcagcgatatccttgaaaatatcgaccttttccaagtgatcccctcccggacttcctatccttatcatttttcattcaccattctccaatcaaatacaggacactatatgtgtatgacgttgtcctatttcaatatgacatctttagaaaattttcaggcagtcttttctatcaaaatcaaaaaaacctttctccctatttgtatgcgcgggaaaaaggttcattcctgtttcgtttgactttctaaaaaaacgggttcctgtttttcatttacggtgtatgtgactgaaaaggccgggacgaaaggagtctctttccataaaatatcctgaatttccgcgcccggtttgattttctttttgttttccttcaggcagcgggcgagatcgacgcgatagtcggcatagatttctccgtcagcgccgattaaaagcggcagagacgtgcctgaaaccggacttttgactgaaggagagtctttcatgccgagcttttttttatttaaagtgaacagcccttttgaaacggcgtcctcataaggaggatatgtatgcttttcctgatacattttgacacgcagcttcatgtcgcggattgcttccgccatttggagatcgaccagcttgacggtcggcttattttccacatcgacaagcacgtattggtacattcctccgctttcataagctgaggccggcggctcctctatgtatctgggcgcgagccgcttaaaatctatcggatatttttgatagagcggtgttttcatatcttttgtctgaatcggcagaagtccgccgttcgcctttttaaattcatccactgccgcttgcacctgctgaagctgatgtttgtaagatactttattttcagttttttttgcttcagggtacagacagccggacagcagaagcaccgccattgccgttatgacggccatttttaacttatgcattccgcgccccctttttgctttattcattgacaggcccgctgaaaacgaccattaacacgatcaatcccgagatgaccatgcaggcataagcgagtgaagaaaccgctgcttttatcagtttgtttttcactttgtacctgctgacataaatagaggccaccgcaacaaacattaatcccatagcaccaagcgcaaaccacattttcattaatgccacactcatgttcgtgcccccccgttccatcattgtaagcgttatatttcattttaatatacaaatgttgaaaatatcaacaggttttccatctattgaaaaaacaaaaaaaactgaagcaaagagggggactttgcttcagtcaagttgactatattcacctgtacgtctgagatacactctcttggacttcgatgctatagtatgcgcagatgcatacgtctgcatcctcttctgcctaaatcagcaaatgttttaagcgatttcagccggagagttctgcgttttggactttcgtcacttcagaatatgctgacggcatgttattgtcacttcacccggttttcgaatgtgttgaccaagtcttccatctcatgggttttcactctggccattaaggattctacggccgtttctaccttctgcccgttaaataatacttggtgaagcgcctctgtgatcggcattttcacttggtatttttgagacagctgatacgcagctttcgtcgtccgcacgccttcaacaaccatccccatcttatccaggacagcttccagcttatatcctttgccgagcaggttgccggcgcgccagtttcgggaatgaacgcttgtacacgtcacgattaaatcgcctacgccggtcaggccggaaaaggtgagcggatttccgcccatctttgtgccgagtctggcgatttcagcaagacctcgggtgattaaggccgcttttgcattatctccgtatcccaatccgtctgtaatccccgctgcaagagcgatgatattctttaacgctccccctatttccacaccgatcatatccggattggtatagacgcggaaatgctggttcataaataaatcctgaaccgcttctgcagccttgatattttttgaagatgatgtaacagtcgtcgggtgtcttaatccgacttcctcagcgtggctcggccctgaaagcacgacgatgtcttttctgtactcctcaggcagctcctcttccattaattctgaaatgcggagaagcgaatccggctcaattcctttgctgacatgaacaaaaatcgattgtttcgggatgtacggcagagcctttttcagcacttcccgaatggcttttgtcggaactgccacaatgatgaagtcagctccttttaaagcctcgcttaaatcagctgtaccgatgatagaacttgatagctccacccccggcaggtaatctttgttttcatgcagttcgttgatttgatcgatcaattcggcacggtgtccccacatcatgacttgatgtccgttatcagccagcactaaagaaagtgcagtgccccagcttcccgctccaagcattgccacttttttcatctctgtatcacacctttttattttcttgctcttgcaaatattttaattggcgtaccttcaaatccgaaagcgtcccggattcggttttctaaaaagcgttcataagaaaaatgcatcagttccggatcgttgacaaaaacaacgaagctcggcggcttaacagcgacttgagtcgcataataaattttcagacgggagccgttgtgcgtcggagtcggattcatggcgaccgcatccataatgacatcatttaagacatttgtctgtacgcggagagagtggttttcactcgctttaataatcgcaggcatgagtgtatgaatccgctttgtcgtcagtgccgacataaacagcaccggcgcgtaatcgagaaattggaaatgttcccgaatattctgttcaaattctttcatcgtgcgttcgtctttatcaacggcatcccatttgtttacgataatgacgacggctttcccggcttcatgggcgtatccggcgatccgcttgtcctgctcaaggatgccttcttctgcattcagcacaacgccgacgacgtctgagcggtcaatggcttttaacgcccgaagcacactgtatttttctgttgtttcatatactttacccttttttctcattcccgccgtgtcaacgattacaaattcctgctgattgtaggtgaacgccgtatccacagcgtctctagtcgttccggctacgttgctcacgataacccgctcttcgccgagcatcgcattgacaagggatgattttccgacattcgggcggccgatcaggcagaattgaacgacatcatcactgtacttcgtctccggaatgtttttaaaatgctcggcacaagcatcgagcaaatctcccaatcctaaaccgtgtgtgcccgaaatcggatacggttctccaaagccgagcgcataaaagtcatagatgttcgctctcatttcggtattatctaatttatttacggctaatacgaccggttttttcgtccggtacagtatttttgccacttcttcatccgcagacgtcacaccttcgcggccgttcaccataaagatgatcacatcagcctcgtccatggcgatttcagcctgctggcggatctgtgtcagaaacggttcgtctccgatatcaattccgcccgtatcaatcaggttaaaatcataattcagccattccgccgaactgtatatccggtcccgcgtcactccgggggtatcttctactattgaaattctttcacccgcaatccggttaaagattgtggattttcccacattcggtcttccgacaatggctacgacaggtttacccatagtacccttcctttcaatccagccgcttacattttcacaaaaaattgttcaaccggttattaaaaatcatcttcgctatgaaaagaacccttcaaacagaagggcttaactcatttattatatcagttttcactgagatcacaatgtattcttcaaaatgtttcgcattcatgtaacagtctccgtctgttttcaagacatttttgtcgctcctttgccctgctttttgcttttttggctgatgcgcgccgcaagctgttcatatgtagtcagcccgacgaggagaatcactcccgccgaacagcctgaaagccattgataatccccgacggctgccgcacccgcaatgttgcggatgaccgcagcatacaatagctccccctggcacatgccgagaacaaaaagacaaagcctctcagggaaccgcccctcaacggaaagcgtaataacggtaagcagtataaccgccgcccattcaggttttatgataaaccaaacaggatcatataatgcaaaaagaaaaataaagccgtacgccgcagacgccgtcagatgaatcacaatattacggagccgtttatgcatgccgaggcttcccgcataaacaaatgccgcagcaaaaaacatgacatatgccgcattcagcgtaaaataagccgtaatctgatgtatgcttgccatcatattagtcaaaataaagactgatacgtaaaaacggcttttcgttttggcaaaaataaaagtcgcaagtatccataaaaaccacattgaccagtaataataaaacggttccataatcgctcctcctctgatcagtatggagcgggaacgcattttttaaaccaattatgcctgaaaggagcggataaggatgggaaaagacagacaggagaaaaaactgaaagcctcccgccgggtggaatctgatcgcgatgattcgattcaccataaaggagcgacaagccttgagcagaacggggaattccgaaaaagaaaatcgtaaaaaacagaaaaaggcatgcgggttcgcatgccttttaacgtctgctgaaacgggatgtgtcaattccccgttcagaaagccagtgatgtgtgtcaccttttatgaccaaaggcgccttttgcaattgggcaaccgattggcatccgagggcggtcataatcattttcagctcttgtaaaagcgccgtcatctcgtcaaacaggccctcttctcctttagaggtgagagctttcaggaaagtgcccgccattcccgcactggaagcgccgagggcaattgatttggcgacatccagggcactttgcagcccgccggatgcgataattgattgatcagcggagagcgagtagatttccgctaagcttgcggcagtggaaattccccacgtattaaaaaaatgaagcgccttctctctgcgcatattttcaatcttagagaaattcgtaccgccgtatccgccggcatcaactgctgctgcgccagcatcaaataactgccgtgccgattccctgctcattccgaagccgacttctttgacaaaaacgggcactcccgcttccgccgcaatccgctcaatgcggccgagagcgccggtaaagcttctgtcaccctctggcatgacgatctcctgaatcacatttaaatgaatctggagggcatctgcttgaatcatatcaactgcccttttcgcctgctcggcatccgcctcgctgcctaaattggcaaatatcagcccgtccggattctcttttctgacgatctcgtaagaacaccgttcggagggatcttttaaagctgacatttgcgaaccgacagccagcggcatgccggctttgcgcgcggctcttgccagcgatctgttaatttcgtatgtaagttgtccgccgccgcctgtcatcgcattgataaaaatcggcgaactgcttgtgagtccgccgattttcgttgagatatccactttttccaatgctaggttcggtaggctgacatgaacaaacgtaatatcatcaagccccgtttcccggttttggccggtagacagcgcatgatttatatgttctctttttcgttctgctcgtgtcacgttttatcaccaatttattttaatttattaagcttgtctccgattaaatcgccaagctggaagccggtgctcggctcttctttcgcctggtattggcggaagtcctcctgatcggctttcggcgcttcttcaagctcacgcatgcttaaggaaatgcgctcttcgctttcgttcacgtcaagcactttcactttaacagtctgtccttcttcaagcacttcatgcggcgttccgatatgtttattggaaatttgcgaaatgtgcacaagtccttccacgcccggaagaatttcaacgaaggcgccgaagcttacaaggcgctgcacttttccttcaagcacatctccctgttttaccttttcgccgatctggctccaaggtcccggcagcgtttctttaatagataaagaaatacgttcgttatcgcggtctacggacagtactttcacttttacgtcctgaccttcttccaccacgtcagacggtttttcgacgtgtgaatgagacagctgcgaaatatgaacaagcccgtcaattccgccgatgtcgacaaatgcgccgaaatcagtcagacgctgcacttttccttcaagcatgcttccaacctcaagtgtttggagaaaatcatgctttttggctgtctgttctttttccactacagcccggtgtgacagaatcacccggtttttatcacggtcgagttcaacgacgataagagagagggttttccctttatagtcagtgaaatcctcgacgaaatgagcttcgacaagtgatgcgggaatgaagccgcgaacgccgatatcaacgacgagaccgcctttcaccacatctttcacttcagcttcaaacacttcttttgtgtcgaattttttttcaaggtcttcccaagcgcggtcagcatcaacggcacgtttagataaaatcaaagcatcgtcttccacttttgttactttcaggtcaagctcgtcgtcaacttttacgacatccgatgctttctctacatgaagacttgataattcactgattggaatgattccggactgtttgacattgacaatttcgacatctacatgcttgtcctctacctttgtcacaatcccttttactacatctccaacctctggcacttgaacatcaatttgattcatttcctctgtcatttgaataacctccttggtccaaacctacacagcttaattaatacggtttgaaagctgaacatgtgaatgtccgcttttcagccgaatatgtattaaagaatcatccaaaaagattttgaatgatcaataaaaagttttattagtattaacttctaataaatggactggtttgtcaagcaataacatcttgtctttcgaaaaaaattataaagcgctccgcccgaagttaacgtgatttctgttcgacgatctccagaatttttcctgcgacttcggcaatgctgagtgacgtcgtatcgatttcaatcgcgtcttccgctttgcgcagcggggaaacttccctctctgaatcgagtttgtcacgtctggcaatttcttcaatgagcgtctcgtaattcacgtcatagccttttttcttattctcttcatatcggcgcttcgctctttcctctacggacgcgagcagaaaaattttcacttcggcatcaggcagcacatgagtaccgatatcacggccgtccatgacgacaccgcctttttgtccgagctgctgctgtcttttgaccatttcttctctgacgcctttatgcttggcggcgattgatacttggttgctgacttcgtctttacggatttcttctgtcacatcttctccgtttaccagaacgatttgtccttccggagcggatacaagctcaatttccgtacgcttcagcagctctgtaagcgcggcttcatcagttaaatcggcattctgcttgagcgccgtatatgtaatggcacgatacatcgctcctgtatcaatgtacacatatgattttttctcagccactattttagcaacggtgctttttccggcagccgccggcccgtcgatcgcaattgataatttcttgtccataatctctctccttgctctttactcctctatggattgtatcatgaactgccggaaaaggggcgaaaaaattgagctgatttaccgctttaccgtttcaatccattcttttttctccattttatcaactccctcatatttcacagctttcgaaatataaggttcaataggctgataatgaagcaagaactgcaccgtgcccaaaatgataagctgaatgcagaccaatttgaccagcagacgttcaaacgttttcatacacgcgcacctccattatgattagtatggaaaagtgtgctgctgtttattccgacagactgtttcttctctgctgcagctgcgcgcgcatacaatattggagtaaaagctgctgtgaagcgggatcgatttctgcaaattcaagcgtcattttttgtttatccgccttttcatcataaaaaatccgctgggtaacagcctcggccgtaatatcggctgtattttccttgccgggaagagaaaatgagacatacagcttttcacctggttccgcggaaatatgctcaggcatcacaacagcgattccgccggcgctgatattagaggaaaccgtttggaaagcggttttttccgcttccattttgacggatacatccaatactgcgtctgcacggacgtatcggcgtctttgaatccgcttcatttcctcctgaggggggatgtccaatccgatcatcgggatggggtcttttttctttcctttgattatgcttttaaattgatacggcacgtggccattccccataaattccgctgttatttccaatcctttatgcaaaaagaccgtccgtcccgaatccagatcgacgggatatgagatgtgcagttcgccgttttcaacgcttactgctttgctcctcgcttttttgggctcattgttctctatgtattcaatccaaatataatctccgacagctatcatgggccttcactctttcattatttatgcttttattaaagcatgtaacgaaaaaaaggaaaagacttttagtcctttcctcctttatttttataggtctttatatataggttctgcactttttaacttttctattttttcctcttttccgtcgtccgcattaatgaacatttgatacgtgtctttcccgatcgtcccgagcatttcgtagcaaagcacttcctgaccgagctcattcgtgatcagcgcctgccgggtctcccgcacttcaacatttttattcagcttcgctttcgcttcatcagctgacaaagcgggagccggaatcgttctcgtgcggtgcgccgacaggtaatcacgcgcggaaaaaccgacgacttcaccatcatccagcgccactttcattcggatggcttccggataaatgcggacgtttttctccacgggaataaaagaaaagacgccgatgttattatattgcgcgctttcatcaatttcgaggccttttgtttcatatccgtttttctttaaaaacgcgacagcccggttagatgcttcattgaggctgatcttttgtttcttcacggcccgtttttgaatcaaatagacaggatgtccccctttttgggtaatatccatatagataaaagatttgttgtcggcgtctttcatgcggatgctgtatacgtcccgattcgttttcctgccgcttttgaccactttaattgaataattatgatcaggcgcaaaccgttgcgcgattttgaccgcttctttttccgtaatttgttttcctttcagatgcgtaaaaccttttcgttctgtatttgctcctgtaaatgtggggctgctgctgtcttcagaaaaagcgcctacatttttttcgactgttttaaagctgtcgacgatcgtattatcgctttgttttttgtcagaggcgagcgccatctcaacatccatccaccgtaaatttttgctcatgacgagatgctgaacgctgcggagctggttttgaatgttctccgcctgtttgtacaggctgttcagtgttgtatattctttcttatcaagcggtttttggtctaaatcccggacggatgttttatagctgaaatctcctatgttggataaaaactcctccgtcttattaaaaggcatgagagtcaggggcagctggctcacattgttatgagcttcagatgttattctccatacatcaatgagcgccggagacagagattttttactgttcatcgcaagcgtcgtcccgattttgtcgtgaagctgatctacatggtacgttaattcatgaaaagccctctgataattattttccgcatgcagaaggaccgcatctttttcctgatgctctttatatccccaatatccggttgcggcgatcgcgacaccgagaacagcgataatgattcctctaatcatgttaacacctcattttgcgtacttttactcacagaaaatgtgttttccgattctttttatctgcggacgtccccaaatccatttgcttgtcgccgtatcaggattaaaataataaattgcgttttcagaaggatcccagccgttgatcgcatcaagaaccgcttcttttgctctttcattcggctgcatgtatatttggccgtcggcaacggcggtaaacgcgagcggttcgaaaatgacgccggccaccgtattcggaaataacgggcttttaatacggtttaaaataaccgcggcgatggcaacctgcccttcaaacggctccccgcgcgcttccccgtacacagcctgtgccagaagattgatgtcgttgtttgagaaaccgccaggcatattggccgctgtcgtattttgcttttgatttgactgaccgcctttattgttttgcggcttttgagcaggcttattcgttcccgccggcttctgcgttccggccctcggttttgtttggttttccaatgggacgttgccataatgagtgaacgtattccctttttggatctgctccattacatattcacggtaatattttgattttgaaatcagcacctgtttggttttcgcgccgacgaggccgtcaaccggtttcatgccgaatttctcctgaaaatttctcacggcccagtatgtggtccagccgtaaacaccatcgattttcccgttataaaatccgttatattgaagacgggcctgcaattctataacatcatcacccgtcgcgcctctttgaatcacttgatttgaaaacgcatgaaccgtttcatgatgatcgaagaaagcagcggcgaaagaaaatagaatgagacatgccataaaggctcctttgcacttcatctcttcaagcctcctactgcaaaatttaaagtgtacccgtattgtctgtcacgaggttatttttatgcacgtttccttcttatcccctgtcaaggcataaaaaagaaaccgcacgcgacgcgcggtttcttcacacttggatcatattgacggagcgtgctttttttgcctttcgcagcccgaaccaccataaaaacagcataaacggcagcatataatatacccaatgattgagggcggtaagaataaaatcgtaagaaccgtgcagacatgaaggcacggccagcgaaatcacaagccatttgacacgggcttttttctgcgaaaagcgggcttttccgagataaaatcccataatcactccgatcagcgcatggcaggagaccggcagaagcgccctgatgaaagcatgctcaacgccgtggccgaatagatacagaatattttcaagcgtggcaaatcctaaagacacactggccccgtaaacgattccgtcataatgctcatcaaaatgagcatgcggatacacactgatcatcagaacgaaccatttcaccgattcttccagaaatcccgaagacaaaaacgaaacaaaaaagcttcctccccccacatgctctttttcaagaacatattggataaacatggtcggaaacacaaggacaaccccgagaaaaaaagacctcagcaccatatgtacgggttcattgtcatactgatcttttaaataaaaatagcttaacagcgcaatgccgggagcaattcctgcagagatgattgcaaacatcaggcaacctctttcctttatattcctatatctatcgtaccatgttgttcatacttttacatctttcaatttttttaaaaaagagcatatgaatgatcatatgctctctgcacccagccgttttgatatttcgtttgcgatcaagccgccgtgaaaacggccgttctcgataaaaatttcgttggcgttatttccagccgcaatgactccggcgataaaaacaccgtcaacatttgtttccatcgtttcttcccggaaaaacggccggcctgattccgcatcaatccgcacaccgattttttcgaggaaaccgtgatcgggatggtatcccgtcatggcaaatacgaaatcgtttttcagccggaccgtctcatttcggccggagcggaaaatgatttcatcttccgtcacttcttcaagacaagcgccgaattccatccggattgtgccgtttctgacgagggcctcaaactcaggcagaatccacggcttgatgctcggggagtactcatgtcctctgtagagcaccgtgacgcgcgcaccggacttcacgagttccaaagccgcgtccacacttgagtttttcccgccgatcacagcaacatctttatcaaaataaggatggccttctttaaagtaatgaaataccttaggaagcccttcacccggtatgttcatataattcggatgatcataatatcctgtcgcaatgatacaaaacggagtgaggtagcggtcttttgatgtttctacaagaaaacggccgtcttcctgtttcgttacgcgctccaccgtttcaaaggcgtttacgcgcagctcttttcttctgacaacctctctgtagtaagagagagcctgtattcggaccggttttctgttttccgtaataaaggcgacatcgccgatctccaatttttcacttgaactgaaaaaagtttggtgggtcggatagttataaatgctgtttacgacattccctttttcgatcacaagcgcgttcacgccaatttgcttcagatgtatagccgccgataatccgcaaggacctccgcctattataattgctttttcttctgtcatgtccttcaactcctgcgattggcatttccatcataagtttccactcatataaaaaatctcctatattatcataggagattttttttgtttatgcaaacgattggtttatatccagcctctgaaacgcgaagcctccgccattttccgcacgccgaccatgtaagccgcaagcctcatgtcaatccggcggttttgggacatttcataaatattattaaacgattttatcatcatattttccagtttttcctcgacttcttcttcactccagtagaagccttggttgttttgaacccattcgaaataagaaaccgttacaccgccggcgctcgccagaacatcgggaaccagcagcgttcctttgtctgtcaggattttcgttccttccagtgtcgtcggtccgtttgccgcttctacaacgattttcgctttgatgcggtcagcgttctcttctgtaatttggttttcgatcgccgccgggacaagtatatcacagtccagctcaagcagctcctgattcgtaatggtgtcattgaaaagcttcgtcaccgttccgaagctgtctctgcggtcaagcagataatcaatatcaagaccgtccggatcgtaaaggcctccgtacgcgtcagaaattccgacaactttcgcgccggcgtcatgcataaacttggccagatagctgcccgcgtttccgaaaccttgtacgacgacgcgcgcgttctgaatatcgagaccttttttcttggccgcttcttttatgcagatggtgacgccttttgccgtcgctgattccctgccgtgggatccgccgagtacaagcggttttcccgtaataaagccgggtgagttaaattcatcaattcttgaatattcatccatcatccaagccataatctgtgagtttgtaaatacgtcaggtgccgggacgtctttagtcggtccgacaatctgactgattgctctgacatatcccctgctcagcctttcaagctctctgaatgacatatttctcggatcacaaacaattccgcctttaccaccgccataaggaagatcaataattccgcattttaaactcatccagatggaaagtgctttcacctctttttcagttacattcgggtgaaaacgaatgccgccttttgtcggacctacggaatcattgtgctgcgcacgatagcctgtaaatattttcacagacccgtcatccatccgaacaggaattttaaccgttaataatctgagcggctctttcagcagttcatacacttcttctggataccccaatttttccagagctttatgtattacggtttgggttgattttaatacatcatgtttgtcttcttcattatgaccggtgaatcgatcggctgccatttgagttaacctcctaaaatcttctgtttctctcatgctccctttcagtgactagtatacaccttcaatatctccgtgcatagaagaaagacaatgatttttccattatttcgcttaaaaaaagacggccgctgaaaacagctgccgtttcaaatcttttttatgaaaaatgtttctggatggtctccacagcattgccgtccatgatgagttttccgtactcatggagcctgtaaatcgtaatcgtcgccgggtgtccgtattcagccagcaccgcgatgacgccttcggcggaacgggagccgaggtcttcaaggcttacatagtattggttctcatagtggtagacggtgccgccggtaatcccgattcggtgaaggcttccggcaagctgaatgatatcttcaaacgaatggaactgataaataatatccggactttcgtcaagtttgacctgcatctcgatataatcatcgtcatattcgtcatcttctgcgtccgcgtcatgatttttcgttacaatcacaaccatgccttgtgcctgaagagaatatacttccaccgcgatcggaccattcgcttcaaagccgagctctgtatttgcttcattcatcatatctttaaataactggtggactttaaacgagtccttccagaggtcttcttttgtcagtccccgatcagtcagatcgtcgagggttaaaaagattttaatcttattatagttcagacgctcaagccgcataatgttccctcctgcctcttcttgcacacaaatcatataacacagtatatgaataaatgagtcataggttcttaatttgttatcagtttacaccgtgtacagcgggaagacaagcagaatgccgttttttatcaccgcggccgggtttgtttcaggaagacggctcatccggtccgcacagtgtaatcatatgcgtctccggtttcgccccgagcctcagcggaacttttgtcgtcccgtagccgttgctgatcaggtaatgcgctttttttaccgttcccgtcccgcccaattcgtacggcccgaaccggccgaaacggatttggccgccatgcgtatggccgctgaacacagcgtcaatcccgtctgactccctcatctgctcatgaatgtccgggttatggcaaagcaggaggtttactttgtcagcatccgtatatctgattgcagcatcgtaatcatccatcatcatcctgatatcatccaccccgcagatcgtaacggtttcccctttataagcaaactgaaacgattcatttctcagcgggatcactttatatgcccgtaaaagagagagcagtttttgctggctgacctcgtaatcgttattcccccacacatacatgacaggcgcaagagccgtcagacgtttgatgttttcttcaattctggcgtaaggaactccgccctccgccaaatcaccgccgagcaaaacggcatccggcttataacctgccgcttcgcggagaagcttttcatcaattaaacggcggtgcacgtcagatataaagaagatggtgagcggcttcatccccttcattttatcaagcgtaaatgtatgtgttttcagatggctgccgtttgccgttttgtacataacggccgccataaccgcagccgctcccgccaatgagccgagaattcccgctgtaagcttcataaacgcactctccattctgtcattgtcttatattagacggacaaacaaaaaaagacgtttctatcctttccggaaaacgcctcattttatttgctttcaaaataaagattgatatcataccgatgtttcatcaagtgaaaaacagattctctcgccctccatttttcaggctggggccataaatccgtgcttttttggataatttcacatctcagtttatgaaattcaccctcagctttttcttccttttttttaaaataataagaagtgcaatacgcaaaagcggaagccataatccagcacaagtaaaccgtatggcctaatatttcctgcagaatcagctgcggagaggcttggggggcactaaagcttttaaacatcagcagtatgcacatcagggaaaaacaaacgagggacgcccactgccatcttcggcattgtgcggcataattttcgtattttaatttccgtttcaccagcgcctgaagcatttgtttcgtcggtccgtcagcaaatcggtctaattgcttccataaagaatccatgcgcttcacaccttgtccgttttcattggtacactatatgaaaaacgcggtgaaaacatgcatttattttaatcagacagcggaatgttcagaacctggccggtgtacacgtcgtttccgtttaatccgttgtagctgcggattttttcttcgcccgcccggcttttataatatttcattgaaatgcggtaaagtgtttctttcggctgtacagtatgctgtacggtccgcacatttttcgggacagtcccggcttgatcactcgcggcagccggagctgctttttcacggacagccggcggagactgctgttttgtctccgcgtattcggtgtctgtcggctttacttgtttttctgagggcgtttccgtttttttaggtgttttttcacttggtttttctttcgttttttcaggtgcagccgcttctttcttatctttgtcgtcagacttttttttcggttgttctaaaagagcagtttctgacgtttctttctgagcgcctttcggaataacggcaggcgcgctttcactgtggtctatgaagacatcttcatagtccttcgggtcaaatctgctgctgttcgtcatataaagaagaccgaaaaagacaccgattgttacgataatgaacaggacggtcagaaaagtgaacagcggcgtttttgttttagttttttccttcacctgctcttccttttttttacgctcctcttttacagattgtcttgtcgggaggctgtcttcaagatattcaatttgttcatccgcggccgcggcaacctgctgctcggcacgcagctgagcttttcttctttcaactcttgacatttccgtcatgcaaacccctcctaacatattgaaaacggatctgacaggcaaataccgcatcaataataaaatgcgctgtaaccggaacgaataaattgccggtccattcatagataagccccagcaaaagactgatacccgcaaccatcataaacagaagccacttcgccaagtatctgaaatgaagcacggtaaaaatgaagctggcggcccataagccgatatgtgtctgcagaacgcctctgaacaaaatctcttcgctgaacgaaatgaggagcgtcaaaaacaaaatatgcagcaccggcctgttcttaaaaaggaatacattaatgccgccgtcatcatataaatgcgaaggacaccatttcatcaccgccagatcggcaaaaatgacaaggacggcaagagttacaccgtaccatatgatattatcgtcacgtatatgccacagctttaaaaaatcgtgaatgtcggtaaaaaagaaaaagccgataacagctgaaaccgccaatatgagcaattgggtggcgtacagctgcatcacaatctcccggtctgagagctgccggatcaattcgctttgccgtctcagctgaactcacccgcagactctgatccgaaaatccggcctaattccagcttccaatcttcaaaccgttccatatttttacgttctcctttttgctcgtacggagccagatcaagtccgcagctgctgcagcattgtccggtttgaccatcaggctcatacggttcatcaaaataagacagcagcgcttctcttatacattctttccgctctaataacgccgaaaaacgattcattttacgcagcttcttttccacgcggtatgtcagttcttcctgcagctggtcttttgtggtttttccttgcagatacagatggacggccgttcgcgcctgtgtttcctggacgcccttattgatcagaacgtcccgaagctttcgctcatcactcgtaccggcatcccgtatgacggccagaatgccttccaggtcataatcagacaggctttctgtctgaataatctgctgctgaagctcggtatcgccgggcgccctcagcaaaatactgacactcgggctgccgtcgcgtcccgctctgccgatttcctgcataaaggcctcggccgtttggggaggataaaagtgaatgacaaagcggatatctgacttatccacacccatgccgaacgcattggtgcagcagatgcaatcaagctggttatggataaattgctgctggattaaaatcctgtcgcctgtatccattccgccgtgataataatccgtccgctttcccgttttttcgttcagctcagccgcaagctcttccgcccattttctggtcggacaatatatgatacccgggccttcaagcttttcggcaagctccgtgagcctgcttattttttcggcattatcagccaaatgttctgccgccaggagaatattcggccggttgactgaataaagatgacgcaccgcatgctcaagtccgagcacatccgtcacgtctctgagcgtttcttttgtcgctgttgcggtcagcgccaatacaggcggctttccgagtgcctgcctgaaaggtccgagcttcgagtaatcaggcctgaaatcatgtccccattctgatatgcaatgagcctcatcaataacaaataaactgaccgggacgtttttcaagcggttcagtacataaggtgaagaaagggcttcaggagacatatagagaaatttataccggctgatgttgctgaggataaaatgccgctctgcggaattcagcatgctgtttaatgccgcaacccgcttttcccctttcgctttcagctgctgcacctgatcttccattaatgaaaggagcggcgaaataatcagcaccagcccgtccatcatgtaacccgggagctgatagcataatgattttcccccgccggtcggaagcatggcgatcgtatcttttttttggagcacgctagtcataatctcttcctgcccttttttaaaggaatgcaaaccaaaatacctggataaagctttatgcagctcagtcatgctgattcaccgtctttgccagcgccagcctgatctgaaaatagctgaagcgcatctgcattccttcgcgaatccgtttaattttattcgtttgatgctgttttgcaaatgccgttatcatacgctgttcctcttcagaaagatactgttctgtaaaaaatgcaggctgatgcaatgatatttctacgatatgatcttcgattgtggcggtttttaaatttctgaccgcggcgatccgttcaatcggaaaccctttttccaacagctcaaaggtttttctggcagactgtgtcagcgcgctttccgcctgcagatcggacaacagctcgcgcagagcgggatatgcacattgcggaagcgattgaataacataatgtaccgctccccaaaactggacggacacataccattcatctttgttcagctggagagcaagctgcttattcgttttaccgattctgttgaatgaagttaaagaatagacaaaaataagcgcctgccgttcacttacgccttgcagaaggtgaaacagcgtctcatgcatttggacggagagctctttagcgtctatgtttttctgcatgaaccgtttgacccatctcagcgtctgcacatcgtttgtaaccgggatatattgattacattgatgctctttgtttgacaggacttgaatgagcagggaaagccgcctccacagggtgacagcaggcgtttgataattcgcgccgtggcagtgcttcggccaaggccgctcggcaaacgcccgttcaagcttttgaacgccgcgcgcagtcactttccacgttccctcttcttttccggctgtaatgtatgagttctcggtgagtttatgcaaagaagccgcaatatcgccgcgttcacaatgtgaagccatgccgaaatatttagcgatctgaaataagccggcatcctgaatggtttgagacgacttttttccttttaataaatgaaacacagcactcggagtccgttcgccgtctattttgtccagacagtcgagaaccacggtatcaaagtagtttatcgccaatctaaacacacctacatttcttctgtgacaagtttcgttttttggttctttttattttaacagattttcatataaatttgacgtttaaagtcatcttttagggggaagtgctaaagagaatcccttatgtgataagcattctcaatcatttttctgttgaaatttgacactaacatcattacaataagtaagaggaataggtgttatatttaaaaatatataaggtaaaccatttgttccaacacgaacaatctgggaggttttattcatggcaaagtacacaattgtagataaagatacgtgtattgcatgcggcgcctgcggagctgcggcaccagacatttatgattatgatgatgaaggcattgcgttcgttacgcttgacgaaaataaaggcgtcgtcgaagttccggaagttctggaagaagatatgattgacgcatttgaaggatgccctactgattcaatcaaagttgcggatgaaccgttcgaaggcgacccgctgaaatacgaataaaaaagccctccccgtgagaggagctttttcgtcctgaataagactccggctgttatcggccggagtcttattttttttgcgtgatcaaacaatcaaaaaagcgcccggtctgtgttttacagagcgggcgctttggagtggttattgtgtctggatgctgcgtttttgttcaatccaaggtttcagcttcgtaaagatgaacgtaaagacaatggtgatgataacgccttttacaatgttaaacggcagaattcctgccacaaccgccgtttttaactggctgtttgacaatgccggtgaatgtaaaaaccaagtatacgcgggcaggataagaatatagttcaaaatactcatcaatacggtcatcgccgcggttccagccagcagactcactgcaagtcctttagcagatttgagctttttaaacataaacgccgtcggcagaataaacagcgttcccgcgataaaattggctgcctgcccgacaggcacgccggccatgcttccttgaatgatatactgcagaatatttttaatcgcttcaaccgcaatccccgccgcaggcccgtaaaccaaaatggcgataattgcaggaacgtcactgaaatcaattttcaaataatccggcagacccggaaacgggaaatttaacagcataagcacaaaagcaatactgctaagcatactgatgacaactaatttttttactttcacaatgctctctccttttcgatcaaatctctcgaaaagaggaaaggttcttttgcgccccaataaaaaaaccgcttttgttaaaaagcgggagcttactaaggcttggcaaagaaacgtttgatataagcatcaaaacgtctgcggaacctccatcttctcccatccagactatactgtcggctccggaatctcaccggatcctgccgccaaagcagctcgcgggcttagagcatgatgctcatcaccgccggtagggaatttcaccctgccccgaagattgatcttatgaatttattcacattatatatgatcaaattgcaattgtatagagaactgctcaaatttaaataaaatattggggaagcccaatttaagctgattcagcggtttccttttctcctttactgcgtcaatacacattgacactctattgagaatatgataaattatcagatatttagtcagctaaactaggaggaaatctaacaatgtttcgagttttggtctcagataagatgagcaatgacggcttaaagccgctgatggaatcagactttatagaaattgttcaaaaaaacgtcgcggatgcagaagatgaattacatacctttgatgccctgttagtccgcagtgccacgaaagtaaccgaagaattgtttaaaaaaatgacctctttaaaaatcgtcggcagagccggtgtcggcgtagacaacatcgacattgatgaggctacaaaacatggggttatcgtgataaacgcgccgaatggaaacaccatttcaacggcagagcatacattcgcgatgatttcttcattaatgagacacattccgcaagccaatatctcagtaaaatcaagagaatggaaccggacggcttttgtcggggcggagctctacggaaagactttaggcattgtcggtctgggccggatcgggagcgagattgcccagcgcgccagagcgttcggtatgacggttcatgtattcgatcctttcttaaccgaagagagagccggcaaaatcggcgtaaacagccggacattcgaagaagtgcttgaaagcgcggatatcattaccgtccacacgcctttaacaaaggaaacaaaaggactgcttaacagagaaaccattgccaaaacgaaaaaaggcgtccgtcttatcaactgcgcaagaggcggcattattgatgaagcggcgcttttggaagcgctggaaagcggccatgtcgcaggcgctgcccttgacgtgtttgaagtggaaccgccagttgaatcaaagcttcccgaccatccgctggtgatcgccacacctcacttaggcgcttcaacgaaagaagcacagctgaatgtcgctgcacaggtttctgaagaagtgctgcagtttgcaaaaggtctgcctgtcatgtcagcgatcaacctgcctgcgatgacgaaagatgaattcaaaaaaatccagccttatcaccaaattgctgataaaatcggaagtctcgtgtcacaatgtatgaaggaacccgtcaaagatgttgcgattcaatatgaaggcaccatcgccaaactcgaaacatcatttattacaaaaagcctgctgtccggtttcttaaaaccgcgtgtagactcaacggtcaatgaagtgaacgccggcggtgtagcaaaagaacgcggaatcagcttcagcgagaagatttcctccaatgaatcaggatatgataactgcatcagcgtaaaagtaaccggagaccggagcacatttacgttaacggctacgtatatccctcacttcggtgaacgaatcgttgaactgaacggctttaatattgacttaaatcctgccggccacctcgtttatatccagcaccaggatacgaccggtgtaatcggacgcgtaggacgcatcctcggcgataacgatatcaatatcgctaccatgcaggtaggccgtaaagaaaaaggcggagaagccattatgatgctttcttttgataaacatttagatgataaagtcgtcaatgagctgacttcaattcaggatattgtttccgttaaactgattgaccttccgtaaccaacaaaaaacccaaaacattcatatgttttgggtttttttacgttaatggcttggaagcggattaggcgcggcaggcacagcgataggttttgtcacatcataattaccgattttctttgtatgcgcatgtgtgaacagcacctcagaataaccgaattccttcgcagttaacagaagcccttcgatcattaaaatcccttccagcgaatcttcaaccttatgtttttcggacaattgaatccgcagctgctcgccgtcttccctttccgataccgatgcaatcgcatcggcttctataatgctcgcagtctgtgagcctccgtctgttgtcttcatcccgtcaatagcctgatatactgaataataggtttgttcagacgggatgagatactcttgtcccagactgtcgctgtaagaaaaatacgcccggtttgtctgtttatgtacggacatttcagcggatatgccgtaagatttataaaaatcctgtccggctccgttttgaacctttttcaatttaatccgctcgtaaggactccatgtcaaagtctctttcagcatctttttcaataagtcagcatcggcaactgattcgatagaaagccgtccgtttacctgcacaagcaaatccttcttatccgccgttacctgcacaccttccaaaaggttcggcacagacaggaaggattcgggcacttctaggttttccgcttcggataaagcctctgataccgattcatccggcttctttttttcaaaactgaccggtatgacggcggatgtttctgaatcggcaaatgccaaagtaatgtaattgtttttgttttggtttgagacgacgaacgtcttctgatccggcggcttgacagaagctgactgactggctttttcagtctggcggctgtcagcggtaagatcaccggaagatttgtttgtcatcaggtgaggagatataatcagagcgatgcacaatgcgcagacgccggctgcggcggggccgatccagcttcgggccggtttttttctgtacggtttacccgtttcaatattccggtaaatggcctcgggtgaacgatgatctctaaccgccggaagttgtcttaacaactcctctactctttcttcgttccaatatgacttcatcatccattagctcctccctcaaaagctccatctgtttccgaagtattttgagccctctgtgttgggtcgttttgactttgctttccgagaagcggagagcggcggctgtttcctgaatggaatatccctgaataaatctcaagataataacagctctttgatcaatagtgcaatgatcaagcgcggtataaatttcccggacgttttcatgctgtacggcgagttcgtccggaagcaaatgctgatctctgacatcttgtgtatcccaatcaaacgtacccataatacgctgtctgatcgtctgctgcttgcggaaccagtcaatcgccacatggcgtgcgatggacaacagccatgttttttcactgcttcttccttcaaatgtatgataggaattcaagacgcggatatacacttcctgcgtcaaatcttcagcctgcgacttatcttttaccatataaaataaaaattgatataaatcttgatggtatgcatcatataatatctgaaaggtttcttccatgggaaacccctccgttcacttttttgtcgtaaaaatgcgttgaaaagttacattacaactatattacgagaaactggaatttggaagggaatttatattaacatattcttaaatttttaaaggagaaacaaataaaaaacacccgcagaacatgcgggtgtttcgtatggaacaagattgttcgtcaatttcagacgtcatccttcacttttgtcggaatataaaatgtaaacgtcgtccctttgtcgatgctgctgtgaaccgcaattgagccgccgtgggcttccacgatattttttacgatggcgagcccgagtccggttcccgccctgcctcttgttcttgctttgtccgctttataaaaacgttcaaaaataaaaggcaggtcctcttccggtataccagagccggaatctttgatatcgatcttcagtccgtcttttacggtctgagccgcgatatgaacgcttccgcctgactccgtatggcgcagcgcattatctataaggttggtaaacacctgttccattttgtcttcatcaaagacacactccggctgagacactgagatgtcctctgtgagcgaaacgcctttttccttcgctaccccggaaaatttgcgggagatcttctccagaaattcatgcaggtttaccgtttcatagtgcaggcccgtatgtccggattccattctggccaaatccagcaaatcattgacgagccggcccatgcgaagagattcatcataaatgatctgtgcgatttcttttttctcctcttcggtgcttgcaatgtcgtccactattgcttcgctgtatccctgcagcatagaaatcggggttctgagctcatgactgacattggcaatgaagtcttcacgcaatttatccagcctgcgctcttcggtcatatcacggagcacggccacggcgccgcggacgtgtgattccgcataaagaggcgacatcaataaaacccatgaccttccttgaagcgtcatttcaatcatttgctctttttccgtgttcactgcattttgaaatagctcttttgcttcagggggaaggttgtctccttctttaatgttcatgttctgctcataataccatgcctgcagaaaacgttcggccggcgggttggtcaccaaaatggtgccgtcgatattaatggtgatgaccccgtctgccatactgcttaaaatattggacagctgttctttttcctgattcagcgcgttaatatggaaattgagctgccgtcccatctgattaaaggcaatggccagttccccgatttcatcttgggtcagaatcggaatttttgtatcaaactttcctttcgccaagtcttgggcgccttcccgcattttccgaaggggatatgtcaccctgctggataaaaagaacgcgaaaaacgttgtcaagacgatggcaatgcccgccgcaagaaagatatagcgtgtcgtatgtttcgtcgtatctttgacggcaagcagcgattgggataaaaagaccatgccttttttgccgtctttttcatacggcactccgacgatcagccgttcgttatccgaaccggcattgttggggaccgcgcgtttgcttacttttttgcggtctgtcagcgccttgtgcagatcccggtcatgtttgatctgctctaatgtaatagaggataaatgattatcgtcattgggcgaataccagacatgcttatcatcctgaatgatcgcgatgctcgttaaattgtccgccagttcccacgtgatggatctggcaagcggctggtcttcatgattttctattatgaccgcaattttgtcggcaagctgcgttaaatctttttccgcttcttcaacgtggtaattttctataaattccagaagcagcaccgttaaaataaataaaacaattaacacgagtgaaagaatggtaaaccagagcttacctactacgcttttccaaaacttcattcagcgcctacctcaaatttgtatccgactccccatacggtgacgatttttttcgccgcccccggggacactttatttaatttttcacggagccgtttgacatgggtgtccaccgttctgaggtctccgaaaaattcatactgccacacttcttttaaaagcttttccctgtcgtacactttgtccggtgttttcgccagaaagtacagcagttcatattccttcggcgtcaggctcacctccgtgccgtccgcagtcaccctgtgagcatcgtgatcaatggatagatgcgaaaagacgagcacattttttgtcggggtatttgctgtcagataagatgtttgggaagcccttcttaaaagcgcctttacccgaagcaccacttctctcgggctgaaaggcttgacgatataatcgtccgtacccgcttcaaacccctggacgcggttggcttcttccccttttgccgtcagcatgataatcggcgtcgcttttttttctctgagctgccggcatacttcgattccgtccgttcccggcatcattaaatccaagagcaccagatcataatctgatgccagccccattttaatggcctcgtcgccgttttccgcttcttcaatcacatagttttcccgttcaaggtacattcttaaaaggcgtcgaattctggcttcatcatctactactaatattttagtttcatttgtttgatccatcgttttccccctgctttccttctgttactttcattttaacaaactgtgcagcagcttgagaactgtatcggctttttgcatctatgcgtacgaatgaagtccggcaagcacgagattcacaaaaattaagttaaacataataatggcgaagccgatgacggcaagccacgcggacttttcgccatgccagcctcttgacagccgcaagtgcaaatacgctgcgtaaaataaaaaggtgatcagcgcccatacttccttcgggtcccagccccaaaaacgcgtccatgcaagctgcgcccaaatcatcgcaaacacaagcgcgccgagtgtgaataccggaaaaccgatggaaacagcgcggtagccgacttcatcgaccaagtccagattcacatttttgacgagcgggctgataagagcgctgattctctttctgaatatcagcctgagcgcaccgtataaaacgaggcctgcgccaaacgaccagatcaccgtattgacctttctgcctgaaaaaatggccggaagctcaataagcggcttcattgcgccttccgtaagcagttctccctcatgcgggccgacaagcgcaggcatatcatatatcatgacgcttttggcttcttttttatccacccaattaaattcagctttgtagtccgccagccggaatgccgacgtgacggcgataaatgccacggtcgtcacgagtataaacatgatgacttcaagccagaacgtttttttgcccggtctggattgatcgacatgctttaacaggaaaatgacgccggctacaaaactgatcgcaagaatcgcctgcccgagcgccgccgtcgtgacgtgaatgtacagccaattgctctgcagtgacggaataagcggcgtaatgtctgtcggaaacatgcttgcatatgcgataagcaaaagcgcgatagacaatgtgaacatgcctaatgaaggcagtctgtaaataaagtaaataataataaaagcgagaacaagcatcatgccgaatgacgtcgtaaattcaaacatattgctgacaggcgcatgtccgcttgccgaccatctcgcaatgaagtagccgagatgacaaagaaatccgaaaatggttaacgtgattccgatagccgaccagcggcccttaccgtccttagcaccttttgttccccggatggcgccgccgaaaaccgggacggcaattaaataaatcaaaaaggcagcataaagaaaatttgcgctcagctccgccatgacaccactcctttttcactaggcctgatttttggccaattctttttgatcggccggctcttgaatcccggtcccgctaagaacaaattcgatatcttttttcagaccgaaccagtttttgttcgtatgtcccgccacaagcacttcatgatcacctgttttgatccagatccttctgtgctgccagtacattccttgaatgacgccgatcataaagatcgcgccgccgacggcaagcacccataaggttaaatcttttctgacggtgagtcctgtaatgtttttcgtttccacatggtcgaattttaatttgtacttgttactttcggaaccttcaacagtctgctgaatcgcaacaaaacttttctcccctttcggcttgtcaggagccgtgattttaaagacaaaagccggattgttaggaaccttcgttttcgtgctcggttctccgtccttgttaaaataaaaatcaggaagataactggcgatctgcactttgtaaccgttaccaagatcatagtccgtgtcgggatcaagaagattgatcttcagtttgccgaatgactgttttgttttttggtcgatcagctgaaataccatctgatcgagctggttttctttatagtccacctgatatacagaataggagtcaaagcgcagcggttcattgacgcggatattgttttctttgactcttttaagcttcggcttttcaccgaatacaatgtcgccttccctcttatacaaaaccgcgtccgttgtgaaggatttggcgactttgccgtttccggctctgtcaatggcgtcggcgaatacttttttctcagtgtctttgttatatgtctgcatcgtgaaccggttgttttttaagtaatatttgccgtcagtacctgggatctgggcggtttcgccttcacggacccagagcgtttcatcgacatacataccgggtacaaatctcagcatggctccgatcagaaaaatgatcaggccgatatgattgacgtagggcccccaccttgaaaaacggcctttttccgccagaatgctgccctcttgttctcgcactctataatgcttttttttcaatcgtgttctgaggctatcagccgcatccccgctcagctcggtttctgtccggctgtatagacgctgcctcttcaaaaagaccggattccgccgaactccttgatttttcagcgccctgtacaaaggaatcacccggtccaggctgcagatgaccagtgatatgccaatggatgcgatcaggagcatataccaccatgagccgtacaggtgatgaaatcccaacagataatacatttggccgattatgccgtactgctgttcataatatgtatccggctgggcgcccggcggcagataagcttcctgcggaaaaaccgtgccgaaagcagacgccgccagagtaatgacgatcagccatattccgacttttacggaagaaaagaagttccataccttatctacgattgttttgttatatgtttgcgaacgccttgcgctgccgtcgtaccgcatatcggcaagcggcgatttttgatcatcaagcggcttcccgcacgactcgcacaaaaccgtcccggctggattcacgtgcccgcattcacatttgacctttttcatgaagacgcctccggcttaattaaattcatatagtcatgaaccatgcgttctgtcatcgtgccggtcaccactttcacgacttttccgtcgggattgatcaaaaatgtcgtcggaataggtgatacgccgtacgcgtccagcacttgccggtcagtatcgagcgcaaccgggaaattgacgccgtatgttttcataaaattatgtactgcaatttttgattcgccgacatttaccgcaaccacctcgacaccgaggtctttaaaatgcttgtattgattctccatgtagggaaattcctgcttgcacggctcacaccacgttccccagaaattcagaaaaacaccttttccttttaactgactcagttctatgagtctgccctctgtatctttcagcgcgaaattcggggctttggacccctcagatatacgctcaccgtttgtgtatacggcattatagatggtatatccgagcgcgcagagtaagatgagaaggatgccggtccgaatgaataaacgccgccgttttttgttcattgtacactgctcccctcccctgcctgcaaatccattcaattatatcatcaacacgttttgtaatttttgaaggttatgtgaaaattagaaagcgtttttaccgtgttcagctaaagcccgcagccttttcacctcatgcggcgacaattctcttgcgtctcctgtgcgcaggcctcttaaatctaaaaatgcgtattcttcacgttttagtttcagcacgtcatgaccgatcgcctcgaacatgcggcggacctgtctgttccggccttcatgaatcgtcagctgaatgatgctcgtctgctttcttttgtccagggaaagcattttcgctctggccggcgccgtcttgccttcttcaagctgaatgccgcgctcaagctttctcagaagttccttggaaggaatccccttcactttagcgacgtacgtcttatcaatttcgtatttcggatgcatgagtttgttggcaaactcgccgtcatttgtcagcaataaaagtccgctcgtatcataatcaagcctgccgatcggataaatgcgctgcggcacttctttgaagaagtcggtcaccactttccgccctttgtcgtcatcagctgctgagatcactcctctcggtttataaagcagaaagtacacgggttcttcccgctccacctttaatccgtttacttcaatctgatcagaaccggtcacttttacgccgagctctgttattacttttccattcacctttacttttccttcttttatcagctcttccgcctttctgcgtgatgccacgccggcatgagcaataactttttgcagtctttccatgtcgttcacctcaagtataatcttacttttttccccttgaacaaacaagctttttcaaggagagttattctgatatataaaaagcgcctgatttcaggcgcttccaaataataacgtaactatgatgattgatgcaaccaccccgatcaaatcagcaagaagaccaacctttaaagcatcccccatttttttgatgccgaccgccccgaaatacaccgtcaggacatacagcgtcgtgtcagtcgatccctgcatgaccgaggccagcctgccgataaatgaatcaggcccgtacacggcgatcagatctgtcgtcatgccgagcgccgccgtccccgaaatcgggcggatcagagcaagcggcacgacttctgcgggaatgccgagcgctgtaaagaaaggcttgcacagccccatgacaaaatccagcgcgcccgaggcccggaatacggtaatcgcaaccagcatcccgaccaaatacggaatgatggaaaacgcaatctcaattccttcttttccgccttcaacgaatgattcatacgtcggcacttttttgatcgtgccgtatatcaatataccggcgataataatcggaatcatggctaaagacagccaattcaccatttccattcgcttacctcccttttcttttgcggcggtaccagaagtagcggtcaatgaaaatcgcgccgattcccgaaattaaagtcgctaagatggtcggcccgacgatatcggtcggtgatttcgccgaataagccatgcgcacggcaatgacggttgtcggtatcaatgtaatactcgaagtatttaccgccaaaaaggtaatcatggaacggctggcctcagacttacctccattcagctttttcatctgctccatggctttaatgccgagcggtgtcgccgcatttcccagtccgaaaaagtttgccatgagatttgataagatgtatcccatcgccggatgatcagggggaatatcgggaaacagcttagaaataaacgggcggcacattctgctgaatatatccaaaaggccggactgctcggctattttcatcaggccgagccagaacacgagaacgctcattaatccgaacgagatcgtaaccgcttctttcgctcctttaaaaacggcttcattcacatcctgcaaggtaccgttaaacatcgcaaagacaagtccgattaccgtcagacatacccagattaaattgaccatgacgaaccgcccgccgcgctcataaacaggctcgtaaacgtctcaatgaaatgctttttcggttttttatggcgcgcattttcataatagacggggatcttggcgatcactttcccatcatgcataacagtcatccggccgacgacatcaggaatgagagaggcgtcctttttccaggcttttttcggttttattaaggttgtgcggatttttacatcgtcgatttcatcctcttttaacaaatatttgacatcccgggcaataaaagcgcgctttccgtaaaacgtctttttcagcttcgggatgccgccttttttggcgacgacataggttttatagtgatcaaagacataattaaacatattcatatgatcatcccaatcatccggatcatttatagtgaccgcgatgagatccgttccgtcttttgaggccgtcgagacgagcgtccgtttcgcgatttttgtgtaacccgtttttccgcctgtgctgtaacggtagagcccggtcagaagcttgtttttatttttccatacccggtccatcgtttccgccttatacacttttgtgcctgaaacggtccggtattccttgattttcatcgcgtatttagtcaaaagcgccatgtcatacgccgttgaatataaattttcatggtcgtccagcccgtgcggattttgaaattttgtattttccatcccgatttgctcggcttttttgttcatcataaatacaaaaccgtcaaggcttccgccgacatattccgctattgccgcagcggcgtcatttcctgaccttaacataagcccgtatacgagatctttcagctttactttttgtcccggctgaagataaatggctgagccttccgtttttacggcattcggggaaaccgtcacggtctcttccatcttccctgattcaatcgccagcaccgccgtcatgattttcgtaatgcttgcaatccgccgcttatgatgttcatccttggcgaataacaccctgccagatgctccgtcgattataatcgcgctttttgcgctgacatgtatttgggcatgtgccgtattgccgtctgtaatggaaaaaagaataacaaaagtcaaaagaaatacggcagcttttttgagaaagcgcatgaatgctcacgtccttgttgtgggtttgtacaagtttatgcgcatgtccatgacttatgaataccaattgcatcactttcacataaaaaaactctcccaaaaggaagagtttttatctgactgatgccatatttgaacctgatgcttcatattgcgccaattcttcccgcatgcgcagaaattcactgctgagcgaaagcagaaggctccgcagcgagtccggcacttgctggtagaattcaatcgcgctttggcctgtataagcggcgcggctgttttcgtaccatgtatcctttttcggcatgaaaaactcttccacgcactgatgatatactttatacagcgttttttccgctctcgcctcatgaaacggctcctgcattaaaagccgcctgcaggcttcctgggcgccttcgcaaaagacggtcatcctcctcagcacactgagcacgtcgcggcagtatgcttcatccgcctctccttgagcccgcatctccggcaaagttgtatgatttaaatagctgctgaccatcgtgacaacctcggctaaaaattcaccagtttcttcagtatgggccctcacaatcgaatttcccatttccgtccgtttccttcctctcttgtacgtcgtcatttgcgtcattcatcaatggcctttccctactatcgtatgatgaaaaacgattattatttaatatcctcaaaagtttggttgaagttttcaaagaataaatcggcttcctcctggagaacgtcttcctccgcattttcaggaagcggcgggagctcctccaatgtttttaagccgaattgttcaagaaataccggtgtcgtgccgtataaaatcgcccggccgggaccgtcggcgcggcccacctcacacagcagcgcttttgacacgaggctgtgcagaatccgctcagacttcacgccccggatatcttcaatttccgcccgtgtgatcggctgcttgtacgaaacgatcgccagcacttccaaagaagcctgtgacagcccttttgacggcacttcgattagttttttcaaataaggcacgaattcttttttcgttccaagcatatacgtatccgcatattcggtaagctcgatgcctctgtcgtcttccttgtactgagcggccacttcttccatgattccggccagttccgcttcttctatttcaagcaccgtcaccaattgctttttggtcagcccttcatcacccgccgcatacagcagggcttccacaatcgctttccaattcacgatatcaagcgccatgaatggattcactccccgtaatgtatatatctgaaaagttttcttcctgttcaatgataatctgctgatttttcatcagttccaggactgctaaaaacgtcacgacgagatggtccttttgccgagaaggaaaaagctccgtgaagtttattcttctccccgccgtttttaagctttttacgatttcgttcattctgtcttcaatcggtatttcctgccttgtaatggtcgtttctttcggccgcgtgatttttttacgctgaagcaccttttgaaacgcgccgatcatgtcataaacggtcaccgacagtttctgctccgtctgtttgatttcttttgcatactcacttaaatcactcggcggctttgtaaatgacttttgtctttcttcttcccgctcttttaaatccttcgcagcggttttatactttctatactcaatcagcttttcaatcagctcgtcccgagggtcttcttcttcaagcatttcgtcttcaaacagctcttcctcttgtttcggaagcagcattctgcttttaatgctgagaagcgtcgccgccatgaccagatattcactggcgacatcaagttcaagctcttgcattgtatgtacatataataaatattgttcagtaatggttgccacgggtatgtcgtatatgtcgatttcaagacggttaatcagatgaagcagcaggtccaatgggccttcaaacgtatcaattttcacttgatattctaccattatctcaccattttcaatatcactctcattgccggaaaaactggctaccctttagtataatccaccgaaatgctctcgtccaatacttttatacacgtcatccgttatttagaaaatactgaaaaagaagatatacgcctatacctttaaaggcggatgcacatatgatagccgtgtaaacttgaaacaaagggaggctgatttcacatgagcggagcttgtttcggcggaggttttgcattaattgtcgttctgtttattttgctcgttgtcgtaggagcatcttacatctgctagttcctcaggcttcagacaccaagccgctcttttttccttttcatagcgctgtggtacactggttttagcataaaaggaggaagcggcttgtatcctaaagcttatatcggctttttggccgaatttcacgcatcaagagattattttgagtgtcatgaactgttagaggaatattggaaagaaagcccggctgaaaagcggagcgttcattgggtcggcctgattcagcttgccgtcgctctgtatcaccagcgcaggggaaatgaagccggggcgaaacggctgattgccaacagcttacgtattctccggtctgaaaagcaggcggtctgttctctcggtctcagccatccgaagctgattgagctgatagaaacgctgtcagacgatatagaagcgggcctgccttacagaagtgttatgctgccgattacagatgaagccctgaaagaagcatgtcttgccgaatgccgccgaaagggctatacatgggggcaagacggcgtatcagatacctttcttattcataaacaccgcctgcgggacaggacggatgtcattaacgaacgcgaacgggaaattgagagaagaaaaaaaagcagaggctgacggtcagccctgctttttctatatcaaaacagctcccgaaaccgtgaagattccgggagcatttgtcagttattatatgagatatcctgatctttttgatgttgacagcgttcaaaaaagctttgcgttaattcattcggaacgagtgcctccgttttgaacagacgttttaaggcgtccatcatttgctttccgattccttgatggcggtgagaaggattcacgctgatatgccggatttcaacttctgagtcctttttttcgactccgatcgctccgacgatatcttcatcctctttccaaagaaagagctggcggccattatccgtttcatagtcctttattgtctgctgaagctgcttgagatctttttcattcggcataaatgacagaagacccatcgcaatcttttcaaacgattttttataacgaattaacataaaaacccctctatatccaaaatgtccattcatgtcctatcaaacggatacataaaggcgatccgtttcctcacattatatcatttccgccgctgttttaaacgcttttcaacaaattattcaaatgaacggtttaaatttgccatttcaatggcagatactgcgcaatccgctcccttatttccggcttttgttccggctcgttcgatggcctgctcaatggtttcagtcgtcacgatgccgaagataaccgggacgcccgtcgccgttcccgcctgggcaatgccttttgccgcttcattgcagacatagtcataatgcgttgtcgctcctctgataaccgtgccgagcgtaatgacggcatcgtattttttcgtttccgccattttctttgccgcaaacgggatttcaaacgctcccggcacccaagcgacgtcaatgtcgtttgattctacaccgtggcgaagcaacgtgtcttccgctccgcttaacagcttgctcgttataaattcattaaatctgccgacgacgattccgattttaagtcctgttcctactaggtttccttgtatgatattcatatgttatccatccttttttgtgagatttgtttttagaaatgaagcagatgtccaagttttttcattttggtctgtaaatattgcttgttatgctcactcgcgtccatttgaagcggcacccgttctgaaatgctgagaccgtatccttcgaggccggcgattttccgggggttattggttaaaagtttcatatgctgaacccctaagtcgcggagaatctgggcgccgatgccgtagttgcgcagatcaggcagaaagccgagcgcttcgttcgcttcaaccgtgtcatacccttgttcctgcaatcggtacgccttcagcttattgattaaaccgattcctctgccttcctggcgcaaatacaatagaacgccgcggccttcttcagcaatttgcgcaagcgcggcataaagctgaggtccgcaatcacagcgatgggatgcaaacacatcgcccgtcaggcattctgagtgcactctgacaagaacgggttcgctgttaaacgggacatcccccatgacaaaggcgagatgttcttttccgtcaacctcgtttgtatatccgtaaactctaaacgtgccgaagtcagtcggcagcgtaatatcaacttctctgttcacaagtgtcgtaatgttgtaacggtactctattaagtcttttatcgtaatcattttcagctggtggcgttcggcgatttcggctaactccggcactctggccattgtgccgtcttcattcataatttcacaaatgacgcccgctccctgagatccgcaggcttttgcaaggtcaacggctgcttccgtatggccggcccgcttcaggacgcctcctttttttgcaattaaggggaaaatgtggcccggacgctgaaaatcgtcagacacagattcttcgttcaacagcgcctgaatggtaaaggatcgttcctgcgcgctgatgcccgtttttgtcagcctgtggtcaatactgaccgtaaacgcggtctcatgtgagtccgtattatgatcgaccatcgggtgaagatccagccggcccgcgatgtcctcagacagcggcgtgcagatcaggcctctcccatgggtcgccataaaattaaccacttccggcgtggcatgctcagccagcgctacgaaatctccttcgttttctctgtcttcatcatcgacaacaatgatgacttcaccttttttcagcgcctctaacgcctcttctatcggatgaaacatatcgatcttcctttctaaaagccgttctcgcttaaaaaggcttccgtgatagtttgattgcttttcgtttgttctgttttgtgcaaaaagcggtataagtatttgccgatcatgtcacactcaatatttacgatcgatccgactgttttcgtctgaaaaatcgtttctgagatggtatgcggaatgatggataccgtcacgctttcgtctgataaaccgaaaatcgtcaggctcacgccgtctaccgtaattgaacctttcaatacgagcgtttttgtcaattccggcgaaagttttaaatcgtaatagaccgcgttgctttttttctcgatccgcgtaatttccgccgttccgtccacgtgccctgatacaaagtggccgccgaaccgtccgttggcggacatcgctctttccaagtttactttactgccttttgacaagccgttcagcgaagtggctttcactgtttccggcatgacatcaaccgtaaattgattgtcagaaaatccggttacggtcaggcagatgccgtttaccgcaatgctgtcgccaagcttcacgtcacttgtcacttttgaagcggcgatggttaatgccatggaaaggcctgtctttttgattgcttggatcgtgcctgtttcttcaacgattcctgtaaacatcgtcaccatcctttccatctttaggtatggccgtcagttttatatccggcccgatttgggtgatttgtgtgaattgtaaatgggggacatctttcattgattgaaaaccttcaccggagatcaagctgggagcaagcgttcctccgattaatttaggggcgaaatagaaatgaagctcttggaaacagccttccttgacaaaacttccgtgtacggatgctccgccttccacataaacggacattatgccgttttcagcgagaatactgagcacctcagggacgtgaatgcggtctgtttccagcggaataacttttattccgagtgcggtcagccggtctttcttttgcacgtctgcacctttggccgtaaatatccatgtcggcgcagcgccgtcagtgagcacatttgccgtttcagaaatggtcagctttgtatcgagaattactctgaccggctgcttcaccgcatcaggaagcctgcaggtcaggctcggattatcggctttgactgtgcctgctccgacaagaatgctttgatgcgatttcctgtattgctgggcatcaagccttgccgcctctgatgtaatccatttgctgtcaccggtttcagtcgctgttttcccgtcaaggctcgcggccgctttcaaggtgacatacggaagtccggtccgcatgaagtgaagaaacattttattcagctcttctgcctgctgcctgagaagtccggttttcacttcgatgcccgctgcttccagcattccgatgccttttccggctacaagcggattcggatctttcacagcgataaacaccctttttatccccgactttattatcagttcggcgcatggcggtgtttttccgtaatggctgcaaggctccagcgtcacatacaaatcggcgccttttgcgtgtctgccggccatatgaatcgcgtgaacttcggcatgggcttctccgtattgcaaatgggcgcccattccgacgatctgtccgtttttgacgacgacagcgccgacaagaggattggactgtgtctgtccttcaccgcgtctggcaagttctattgccgtattcatataatattcttccatcgttatccctcccttcttccacgcaatttggcgtcaaaaaagccccgaatgtttacacagttcggggctttgccagttttaatccataggaaatagactatacagtaagtttattttttgcatagcttctctcatccttctcccatccagactttcactgtcggcttcagcttttcactgaatccaccgtatacagatgcatacgggtcacgggctgtaaagcgcaaaacgccttattaccgccggtcgggattttcacccagccccgaaggatacaatcaatatttttttgtccttatccgctattataacatcctttgcggcaggcgcaatgaatttgcacctaattattcagaaaaataaaaagcgcccttttcccataaaaggcgcctttatttattcgttcactttgacgaccttcaataagccgtcaatccggtttgatttgctgaaatacgctttaatcttatctccctttttcacatcggagagatcctgcttcagcttgtcgccgttaaaaataatttttgtgccgttttctgccgtaccgtggtactcagttccttcgattttcgtaattttatatgttttgactgtatattcttctttttcctgggacagggtttgtccgattgcagtcggcacgtctttcagttcaatatcgtttatgaccatataaccgcccgctaataacagcagcagtacaagtaaaatggctgcttttgttttaattcttcccatttttctacctccagcccgtatcaatctattcattactatgtcatattcctttttttcatgaatagaaaaccgttcttccctgcgtgagttattcatataacgtttcataaagggaagatgtttcatgtatctgtaaaactttctatctattaaatagatatacgaatttatgttctgtttttgagggtggaaagataaatttatataaaaaaagcagttttcctcatgaagaaaactgcctgtacggtttatttcgtcttgcgaatttcgttaaacgggaagaagacgaattttgatgtgcccgctatttgttttttcgtaaaaagaccgaggccgttgcggctgtccatagattctctgcggttatcacccatgacgaaatatttgtcgtccggcaccttcaccgggccgaagtcttctgtcagccggtcatagccgtcttgcttcgccttgtgcttgtttgccgctaaatacggttcggacacttttttgccgttgatgtacagctgatcgtttttcatttgtaccgtgtcgccgggaagtccgataatccgtttgacatagtgctcattttctccgttcagcacgacgatctggccgcgtttgaagtcgcttatgtatttgaccgtcatattgacaaagattctctcgcggtcatgcagcgtcggatccattgatcttccatcaacgagataaggggcaaataaaaagtttcggatgagcagtgccagaacgacagcgatgataatggctttcgcccaatcaagtacggcgctttttttagaagttttttctttttctgatttcaagtgatttcctcccattagccatggtcgtttttattttaccatgaatccctgcacagagggcaaataagccccgcacctcatccatttttttcattttataagccggatctgctgattttacggtatttcacgaagcttccgatccgccaaatgcacaaatacacaaaagcaagttccatcgttaaaacggcgaattccgccgcgtcaatgtttttgaaatattggctgagcacgatacggatcgcaataatcgcgataatgacatatttaaagtttttattccgcttggagtagacaaaaccgtcttcccggatttcataggcggtttgcgacagcatgatgacgccgaataccgcgcctaacagtccggcgatggcgagctcccaaagagcgggaaaatgagccggctttcccgggatattcatgagctggctgatgctgaatgtaaaaatgacggcgataatcaaaagcgggagaatgatgccgaagccgccgcctttaatcggcctgtttccctttttcaccctgaaccaaatcataagtgcgagaatgataatgacaaataaaacggttgccaattgaaccaacgtttctacctcttttcattgttgtaatcggtctttttcactataccagaatgatcactgatgttcatatatgtattttttcatgatttacacatgagaattttcatatacataaaaaaacccgcctgaaaaaggcgggttttccgtcattatccttctacacggatttctttcattttgtctccgttagacatgtttttcgcatgctctaaaccgcttgtcacttttccgaatacagtatggacgccgtttaaatgcggctgcggctcatgtacgatgaagaattggcttgaacccgtgtctttaccggcatgcgccattgataaagaaccggcttcgtgtttatgcggattgccttctgtttcacatttgatcgtttttccgcttccgcccatgcctgtcccagtcggatctccgccttggctgacaaagcccggaatcacgcggtggaaaataacgccgtcataaaagcccgtattcgccaggttttcaaagttagcgactgtattaggtgcttcattcggataaagttcaaattcaattctgctgccgttttccatttcgatgtaaccagttttcattctcattcctacttccgtattgttttttgtcaaagccttcttcaatatgaatttcaattgtaagccggctttctttttgatattcttttgaaggaagaggcctctgctcttcttttcgcggctattataccacaccttcagccggaaaacgaatctccacgcttccgcagaaagaaaatgaaaccagaacagcttcacagccgtctatgtatcggaactgcttcacgcaggtcctcacaaaccgcttcaaaacggcatttgtgaaaagaaggaggttaaccgctttgaaaaaaatgtggattggattgctggcggcggccgttgtattgtgcacaataccgaaaatcagcctggccgatgccgcagtcggagatgtcatcgtcacactgggggcggatctgtcaaacgaaaaccgtcagaaagtgcttgacgaattaaatgtccctgataacgcgacaaaagtgacggttacgaataaagaagaacatgaatatctgggaaaatatatatcgaatgcccaaatcggcacaagagccatctcttcatcatccatcacggtggcaaagaaagggtccgggcttgacgttaagacccataatatcgattccatcacggatgaaatgtacttaaacgccctgatgacagcaggagtgaaagatgcgaaagtatacgtgacggcgccgtttgaggtatcaggcaccgcagcattaacgggaatcatcaaggcatatgaagtctcatcagacaaagcgatttcagaagatgtaaaacaggtcgccaaccaagagcttgtcaccacttcaaatctcggggataaaatcggggataaaaacgcctccgcgctcatcgcaaacattaaagatgatttcgcgaaaaacggtgtgcccgatacaaaagaaggaatcgagaaaaaggtcgatgatgcggcttcaaaccttaacattacactgactgacgctcaaaaagaccagctcgtttcattgtttaataaaatgaaaaatgccaagattgattggggccaagtcggcagccagctcgataaggcaaaagacaaaatcacgaagttcattcaatccgatgaaggcaaaagctttgttcaaaaagtcattgatttcttcgcttcgatttggaatgcgatcgtgtctgtatttacaggagacagcggatcaagttctaacagctgaatgcaaaaagagaccggacgccattgttccggtctcttttttatttattgtttgacccccgtcttaaacggcagatccagttttacaatgtcttcataagtttcccttctaatgacaagatgcgcttcgccgtcttccacaaaaacgacggcgggacgcggaatgcggttgtagttgttagccatgctgtatccgtatgctcccgtgcagaaaacggcgagaagatcgccttctttcacttccggaagatctatatcccaaatgagcatatcaccgctttcacagcacttacccgcgatggataccgttttatcgtggtgttctccgattctgtttgccgatacggcctcatatttcgcctgatacagcgcaggacggatattatcgctcatgcccccgtcaaccgctgcatatttacgggtgccgggcacttctttttgcgaaccgatggtataaagcgtcgttccggcgtctccgacgagcgagcgtcccggttcaatccagatctccggaatgtcaaaagcgtgcagcgctgcgttttcttttaccgcttcgataattttttccacatagacggcgggatgaaggggttcatcctcctccgtgtagcggatgccaaagccgccccctaaattcagcacttcagagacaaagccgaatgattctctccattcattcagttttgtgaagattttttctgcggccagcacaaagcccgccgtatcaaaaatttgcgatccgatgtggcagtgaacgccgagaaggcggatatggtctgactgtaatacttgttcaatcgccttttctatttgcccgttatgcagatcaaaaccgaatttggaatcttcctgtcccgtcgtaatataatcatgcgtatgcgcctctacccccggagtgatccgcagaagcacatccattgtgcgccctgatttgcggcacagttccgcgagtaaggatatttcataaaaattatcaacgacaatgcagccgatttgatgatcgagcgccattttcaactcttcttcgcttttgttattgccgtgaaaatgaatcctgtcagccggaaaaccagccgcaaccgccgtaaacagctctccgccggatacaacgtccaatgagagcccctcctgctcagcgagctgtatcatcgcaacggaagaaaacgccttgctcgcgtacgcgacctgcgcctttaaatccgcgtcaatgaatgcctgtttaaagcttttagcgcgctcacgtattaaagccacatcgtaaacataaagaggcgtgccgtaatgctccgctaaatacagcgcgtccacacctccgatttccaaatgacctagtttgttttgtctgcttgtgccatgtaagaacaatgctcattccctctttctgatccgcatatgggtgaaaaggacagcttcttttgagctgtccttatacaagtcccgtataagttaagacatacaatatcataatcttctgtcggtttcaatgcgattatgaaccgcttggctgtctttgacggtctttcgggtgaacaatgctcggtctgactttcgctcccggcactgtcgtccggacgagcacctgccacagcgccttgccgttaaacggtaaaaacggccataaatacggcgtgtgaaacgagcggatattcgccattatgatcagcagcaatgtaaagcctatcacaaagccttttacttggaaaatggccacgagcaccattaagatgaggcgtatcattttattggcgaggctgagctcatagctcggcgtggtaaatgatccgatggcggcgatcgatacgtacagaatcacttctgctgaaaacagccccaccgctatggcgatttgaccgatcagcaccgccgcaatcagacccatggcggtggataaagcggtcggcgtatggatcgcggccatcctgagaaactcaatccccaaatcggccaaaaagatttgcagaatgatcgggatgtgcgtatttttatttaaaccgataaaatccaatctttcaggcagaagagacggttcgagaacaaagaggaaccaaatcggaagcagaacggttgaagcgataataccgaaaaacctgatccatcttaaaaatgtgcccactgaaggcgcctgcctgtattcttccgcatgctgaacatggtgaaatattgttgtcggcgttatgatcacgctcggtgacgtatcgacgacgatgatgacgtgcccttccaaaatgtgattggcggccacatccggccgctccgtgtatctgaccatcggaaacggattgtagccttgtttgacgatgaattcctccaccgttttatcagccatcgtcagtccgtcaatgtcaatcgcattcacttcgttttcgacgatgctgacaaggtccgggtccgcgatgtcctctatatacacaatcgcaagatcggtcttagagcgctcgccgactttcgtaattttgacgcggagcctttcgtccctgattcgtcttctgatcaatgctgtattaatgacgatattttcgataaaaccgtctcttgctccgcggacgaccttttccgtatccggttcttcaggtgtgcgtccggggtaacttctgacgtcaacgataaaggcgaagcccgcgtcttcaacgataacggcgacaagtccggaaagcacctgatccgttacttcgtcgagcgttttgactttttggacctgctgattgacaagcctgttttcaacaacgtcaatcgcttcatccgcattctcgtcataattattgatgtcgacgagctgttccattaaatgaacgataaacaaagtatcggttaatccgttgacaaagtaaatctggacttcccggtctaatactcgaactttgcggacgccgacatcatagctcgttcccataccgacgcggtctttaaaaaattgttcattttttctaggatcccggtacaccttgatcatgttttccggtttttccggcatggctttcgctcctttctaaaatgaattcgaccgccttcatcgtgatcggcgagcctttggatatgtcatcttttctccccatctttcctatgtcgccgatgcccacaatgaggggaacgtccaatttatccagacaatacaccgtatctccgttcattctgtgctcgtccatttctctcattccggttttatcgacgccaaactccgtcacttctccatcacggtcaatggagacatcgactttcgtccattcagcctgatgggtcttagaagcgaccgcaatcacccccagcacttcaacgtcctgatgtgaggcgacatatttcagcgccgtttcgcccggcccttccccttgcaggcctgaatcgtcaaacatgacaaacaccgggtcattcggcgcggctttaatcagctgaacaagttcggggccgcttctcgttgacggattgccctttgattgggaaatacaccgtccgcctgctttttctgcggcatattcaattgttttggcggcgtatacgtccccgtctgtcacaagaatgaccttccgtttcgtcatcaggcattatcctttcggtttaaaaataacggctacaagaaatgcgaataaaatcgctgaagatataccggcggaagtaagttcaaaaatccccatggcgatcccgataaatccatgctcgtgagcttgatgcatggcgccgtgcaataagctgtgaccgaagctgacgatgggaaccgtcgcgcccgcgcctgcgaattcgataaatttgtcataaattccgaacccatctaacaaggcgccgatgacgacaaaagttgtcatcacatgggcgggtgtcagtttaaaaatgtcaagcagcagctgaccgataatgcaaatgattcccccgcaaacaaaagccaacagatattccatttatgatgcacctcccgcccgctcaaataccacaccgtgcgcgatggtcggaatggtttccttctgctggatcattgtcggactcaaaagcgctcctgtcgcgacaacgagtaccctgtttagagtccctgcttttaattgattaaaaatatgtgtgtacgtaacaagcgcagagcaggcgcagccgcttccgcccgcaaacacctgctggtccggcgtatagatgagaagaccgcagtcatcgtgtttcgttcccacgggatagccttcttctttgagcaaatcttttacgatcggcgagccgacgcctgaaaggtctcccgttaaaatcagatcataatcatccgccgtgcggtttaagtcctgcaggtgctgtttgattgtgtcggcggcagcgggcgccatggcggatcccatatcgaacggatctgttattccgaggtcgcttacttttcccactgttgcgcttgtaatcttgatatcagaagggttttgactgatgatgaccgccccgccccccgtgaccgttgaagtggcggtatccggtttttgcccgccgtactccgtcggattgcggaattgccgttctgccgtcgcgttatggctgctcgtggctgcgatcgcccggttcgcaaaaccgccgtcaatgagcgcggatgcgacggcaatcgtttccattgatgtcgaacaggcgccgaacagacagaggaacggaattttcagatgtctggcgacgtagttggcggtcacattttgatttaaaagatcccccgcgagtaacaaatcaatatcgctcttttttaaattctgtttttgcaaagcggagttgatggcatcttccattaactgacgttccgccatttcccagtttttctgattgcaatgcatttcatcgtatgtcttatcaaacagcgaaccgagcgggccgtctttttctttcggtccggctgccgtccccgccgcatttacaaataacgggttttcaaacacccaggtttgctttccggtcaatttcattttttctcctcctacgaaaacagtttttcacaagcaaaccgtatcaggcctacgatataggctgccaccacgccgaatacaatgacgtttcccgccaatttaaacatgtttgtcgctactccgagcacgagtccttcacttctgtgttcgagagcggcgcttgtcatactgtttgcaaaacccgtcaccggcacggctgaacccgctccggcaaactgcccgagtctgtcataaatgccgaatccggtcaaaagggcggaaattaaaataagagtggcggccgtcgggttgcctgctgttttttcattaaaattaaaaaagtggatgtaaaagtcttgaagagcctgcccgatcagacagatcaaaccgccgattagaaaggctttgacgcaattccaaacatatggcggtttcggctgatagtctttcacttttgttttgtaattttcttttaagtttgtcatgtcggttcctccttatgaatgatggataaaatacagccaatgaaataaagagccggctattttgccgaacacaatggccatcagcaatatgatgattttgctgccgaagccgatccgtttggcaagaatgggaagcacattcagcacttctgtaagcgcggcggccagcatgccgacaaacatgccggccaaaagcccgaccggaacggccagccattcagataaaaaaaaatgattcatatttaaggtttcccagccgccgaacacagctcctgaaataacagctccttcgtaagcctgtacaaagcgcattgtttttgtcagctgcataaggcgggggacgattcccataacggttaaaaaagccacaaagcccgcacccacggtcagccctccgccaagcccgacaaatataacgaaaagaatgctaacgatcatgcagatctttcatcgtctcttcattttcgtgcattgcgacataatgatcgagatcaagctgataattaaacatctcgacttccagcgggcttggctcttcattcaggcgttttttgaagatgtgattaaaaaagacgatcataccgagaccgaggccgatgctgtatggaatctgaagcagatacggatattcattccgttcgcccgttatgatttcatataaggcgatatgaacttctctcatactgacatcttcatgaaaattcataatggcaagacatgaaccgataaaaagcaggagccagacaccgacgaacaaaacggctgacagctgctttttttggtaatggatttccactatcgtttcagctccgccgacggtctgtacatcaagagcgggaaaagcggtatgaatggttttcagcacttttatgatgtccagcacgacgatatttttatcttttttcgtgaccttatacagcggcagtgccgacagtttttttttcagcttttgctgtcccgcgatctgcgcggcatcgccgattgtgatgatatctccggtatgagccttcacgcggtggcgaagtctgagaaatattcgtctttccatcttgcatcaccatctttcgggtggttatatatgtagtatgcggttcacttttgttctcattcatcagcggcaaaagaccataaattaccaccgatgcacaaataaaaaaagccggcccgtaaaaggtcagctttccgtatgatccatttgcactttaatctgctttaatatttttttctccagcctcgatacctggacttgggaaatcccgagccgttcggctacttccgactgtgtctgatctttataatatctcagatagacaatgagtttttcccgttcttccaaatcactgatcgcttccttgagggcgattttgtcaaaccacttctcttctgaatgatcggcgatctgatcaagcagggtgatcgggtctccgtcattttcatacacggtctcatgaatggatgaaggcgcccgcaccgcttcctgcgcaagcaccacatcctccgcatcaatttctaaatggtccgcgatttcctggacggtcggcactcttccgtatgtttttgacagttcatctttcgcccggcgtattttattgccgagctcttttaaagatcttgaaactttgacggttccgtcatcgcggatgaagcgctggatttctccgataatcatcggcacggcataagttgaaaaacggacatcataggacaaatcgaatttatcaacggattttaacaatccgatacagccgatctgaaacagatcatccggctcatagcctctgtttaagaacctttgaacgacggaccacacaagacgcatgtttttttctatgaggaggtctcttgcctgctggtcgccctcttggctctttttgattaattctttgacttcatggtccttgagctgcgcgtttttgctgtttttcttaacctccacatccataacaaatctccttaattacaaagcgctttgctttttgataggtgttttgttaagcgtatcgtcgttcccatctccggcgaggaatcaatcgtgacatcatccatgaagttttccataatggtaaagcccattccggagcgctcaagctcgggttttgtcgtaaagagcggctggcgcgcttcctcaagatccgtgatcccgaggccttcgtcacgtatggtcagatagacgacatgatcctccagcgtaacggagatgtacacctttccgtcacagttttcttcatagccgtggatgatcgcgtttgttaccgcttctgatacgacggtcttgatttccgtcagctcatccatcgtcgggtcgagctgtgcgataaaagaagcaactgttacgcgcgcaaacgattcgttctgactgagggctgaaaattcaagatgcatctcgtttttcatgatgccacccccaacgttaaaagcgctttttgttctgattgttcgaacctgatgattttaaacaggccggacatgtcaaacagacgtctcaccgcgggtgaaatcgcgcacacgaccatttctccgccgagctgtttaatttgtttataacgccctaaaatcacaccgaggccggagctgtccatgaaggtaagatcttcaaggttcagcacaatgtgacggatgccgtcagcctccagcgattcagtaaccttttgttttaatgattctgccgtatgatggtcgagttcacctgttaatcgaatacaaagcacggattctttgacatgaaagtcaattccaaggctcatgctcattcctccttgatatgatcggataatgagtgtttcgattttcgggaaagcaattccttcactatgacaaaactagtgcccgttcgccacgattatttaaatttagtccaatctcccatcgtccgcttcagaaaagtgagaaaacccgctttttccatgtcgtcttttgccgtgaccgggctttcaacgagcacctttccgtcttttttcagaacgaggctgccgagcacttctccttttttaaccggagccgttacattgccgttgattttcacttctttttttactttgtccatgttctctccctttttggccagaagagaaatcggctcagatgtggtcagcttgatcagtttctgttttccttttttcacttttaccgttccgacgatttgatcccgtttgtacagcgggtgtgttttaaactggctgaaggcgtaatcaagcattttggtcacttgggcatttctttctttcggagtgctggctccgaaaacaacagcaatgaccctcatatttccttttttagcggtggcggttaaacaatacttcgcttcgcctgtaaagcccgtcttcacgccgtctacacccggataaaatttgatcagccggtttgtattgacgagccagaactttttgtctgtattttctcttaaataatcctcatacgttcccgtaaattgagtgattttatcatactttaataattccttcgccattttcgccatgtcataagcagagctgtaatggtctttttcaggcagtcccgtcgggtttttgaaggaggtatctttcaatcccaattcttttgcttttttgttcatccggctgacgaaatcctcttctgaaccggcaatatactccgccattgcgacggatgcgtcatttccggaagctatcgcaattcctttgagcatttcttttaccgtcatttcttctccgggttcaaggaaaatctgtgatccgcccatggacgcggcatgttcactcgtcctgactttatcgctcatctttattttccctttgtcaagcgcttccatgattaaaagcatggtcataatttttgtcatgcttgccggcgccagacgctcccggctgttcttgttataaagaatgcttcccgtatcgcgttcaatcagcacggcgcttttggcttcatgagcgagctccgatgtatgttttccgtccggctttgcaaaagcggacggtgctgatgccgttaataaaatgccaatcaacaaagtggatataagacgtttcatctccaaagccctccatttcataatcctttttattttttccaaatccggtggttttatacgcctcatctggaaaatgtttcgtgttgagggcacaaaaaaacagctgcttccgaagaaacagctgacttatgctgacttatttttgagatcgtgcgactacggcttttacaagcttcaagaagccgccttttactttttccgtcatttccattacttcttcatgggataacggctggtcaagaatacctgccgccgcgttggaaatgcatgagatgccgagcacgcgcatccccgcgtggttggcgacgatgacttccggcacggtcgacatgccgacagcgtcagaacccatcgttcttaaaaaccgaacctcagcaggcgtttcgtaagacggccccgtaacagctgtatacacccctttttgaacaggaatgcccagctcatcggccgttttttcagccaagcctgacagctctttgtcataggcttctgacatgtccgggaatctcggtccgaattcagcttcgttcggcccgattaacgggttggtgcccgtaaagttgatgtggtctgtaataatcatcagatcgccagcgcggaattcagtgttgataccgccggctgcgttcgtcacgacaagagattcaacgccgagcgccttcatcacgcggacgggaaatgtgacctgatccattgagtagccttcatagtaatgaaagcggccctgcatcgcgatgacctgcacgccttcaagcgttcccatcacaagctggccggcatggccttctaccgttgagaccggaaaatcagggatcgtttcatatgtaagcttgacagctccttcaatttcatcggccaatacgccgagccctgaccctaaaatcagaccgatctttggtgtttctttcacgtgttctttaataaatgcagcagcacgttcgatcttttgtttcaaaaaaagtccccctactgtaatcttgataaaaagctttttccgtatttcggcttttccgttttgaaattatccgcaatggttgcgccgatatcggcaaatgtatccgcaagcggcagctgttcagtgtgtttgtgctttttgctgtacacaagaagcggcacatactcccgcgtgtgatccgtgccgtgatggacaggatcattgccgtgatccgcagtgatgataagcagatcgtcttctttcattttctcaaacacttccggaagccttgcgtcgaattcctcgagcgcttttccgtacccttccggatcgcggcggtgtccgtacagcgcgtcaaaatcaacgagattggcaaagctcaggcccgtgaactcttcaccgagcgtttcaatcactttgtccatgccgtccatattagataccgtccggcgggaagatgtaatgccttctccgtcataaatatcagaaattttgccgatggaaatgacgtctaatccgctgtctttcattccgttcattaccgtgcggccgaacggtttgagcgcataatcatgacggttcggcgtgcgtttgaagctgcccggttctccgacgaacggtcttgcgataatccggccgaccatgtacttcggatcaagcgtcagttctcttgccgtttcacagatgctgtacagttcgtcaagcggaacgacatcttcgtgagccgcaatctgcagtacggaatctgctgatgtataaacgatcagcgcacccgtttccatatgttcttttccgagctcatccagaatcgccgtgcctgaagccggcttatttccgatgattttccgtcctgaacgccgctcaagttcctgaagaagttcatccggaaatccttccgggaacactttaaacggtttttcaatgtagaggcccataatctcccagtgccccgtcatcgtatctttcccgtttgacgcctcctgcatttttccgtagtacgcaagagggtgctccgttttttccacgcccttaatgtctccgatcagtccgagaccgagctgcgccatatggggcatatgtaagccgttcatgtgctctgcgatgtgtccgagcgtatttgcgcctatatcattaaaatcggcggcgtccggcgcttcaccgattccgacagaatccattacgatcaaaaatacccggttatatttgtattcagacatcataaaagcctccttttcttccatctgtccattgtagcttacagaggtcagacaactcaagtataaaccgtttacattcttgttgacaatgccgattcaaataattagaaccttctctgtattccgccaatccggcaaaaaagccgcggcccctctggcagcggctcctaagcgcgcggatgatactgtttgtacacgtccttcagccttgttttcgtcacatgcgtataaatttgcgtcgtggaaatatcggcatgtccgagcatctcctgcacggcgcgcagatccgccccgttttcgagcaggtgcgttgcaaaggagtgccggagcgtgtgcggtgtcagctcttttttaatccccgcttcaagggcgatttttttcaggtttttccagaatccctgacggctgatctgcctgccgtgatgattcagaaaaagcgcttcggttacgtttttctttaataatttccctctggctttttcaatgtatgcttctatcgcatgggaagcggcttcaccaatcggcacaatccgctctttccgcccttttccgaagcagcggacaaatcccatcgtcaaatggacgtcggataatttcagctcgatcatctcgctgaccctgatgccggttgcgtacagcagttcaagcatggctttatccctgagaccgaacgggctgtcaagcttaggcgtgtccaataaccgctcaacttcgtgaagcgccaatactttcggaagcgtccgctctgttttttgtgtttcaatatgtaccgaaggatctttatccgcggctttttcccttaacagaaattgatgaaaagaccggatcgacgccaaatgcctcgcagacgtcttgccggatttcccggagtcctttatatgctttaaatattgaataatatgaagacgggtcacatcattccatgaagtgatctgaagggtttcagttaagaagagagaataacttttcagatcacgctcataggacatcatcgtattttgggacagccctctttcaaccctcacataatggatgaaatccttaatttgatccttcactcttgatctactccccgttttggtaaaaaaagatcaatcggccgaaccagccgtctttctcctcatgttccgttttggccactttgacggcggagccttccggtttatcgtaccgatgatagttttcatactctaaattcacccatatcatagcataatagaacagcgcggtaaaacctgtgaacagaataaacactttgatcgtatccgcggctgtttttaagaatctgcccatctttcgatcgaccctttcttttggcggctgttagtacaccttatgccaatttcaaaggcttttatacataaaaacagcaaaaaaccctttcctggcagaaaaggttcgtaggcttttactctgtttcatccccgcggcagcggtggcagattccgtgaaaagtcaatctatgatctttaattttaaatttccaatcacgttcaatcacttcttcaacgtcttcaagcagatcttcttcaatttcatcgacggctccgcactccatgcacaccaaatggtgatgaaagtgagccgcgccttctttgcgaaggtcgtagcgggatacgccgtccccgaagttaattttatcaacgacttttagctctgttaataattctaatgtacggtatactgtagcgagaccaatttcaggagatttctcttttacgaggaggtatacatcttctgcgcttaaatggtcttcttcgttttcaagcagcactcttaccgttgcttcccgctgtggcgtaagcttgtagcttgacgagtgcagctgctttttaattcgatcaatacggttttccatgtctttccctcctacgccgcattccatgactcattataacaaaatacgcgcagagttccaactataattattataaactgataaataaaagtattattttgtgataatcattctaaaatatgcgtgatgacagcttttccataaacagcggagacacgtacgcctcgagcagcgaggcgatgaccgagaagaaaacgatgagaatcagcacgaaggcgtagcgtccgaaccattggatcggtgcgtcatgaaggctgcgtttgacaaacagctgccggatcagtttcagtgaaaaagcgatggagcatgtccccatgataagatacgccggaatgagaacgatgttttgcggcagaaccgaaataaatgacaggaaaaacccgttcatccccatttgattcactaaaaaaccgaccgtgaagccgacgacgattccttttaagaacaccataatgaaaataaccggaagaccgatcacggaaataccgagaatccacatcagccccaaatatttcacatcatgaaagacggcctgccaaaacatttctgaagcgccggcatgttttccgtcagacagctgtccgaaaaacttgcttaaatagtaatacaaatcttctttctgcgtgatggtcatgctgttgacgataatcgccccgaaaatgacccccatcaaaaacaagacgaacacaaatatataaagtgacagatgatcctttacatggcgaaaaaacagttctttgtacgattgttttctcataccgctttcctcccgctaatctattgacttgatttagtagattgtatgaaagaaaagagaaaacatgacagagaaatcatagaaaggcgcgagattcgggcataaaaaagaaccccgtcatcactccggtgatcataggggttcctttttttatgctttattctttcaagcctgtcttttttggttttcgtcactctttcatgggtgctgaaagacggcgccgtcccccttgacaggactgcgtcacgcattccgtttcttttgagatgctcccgcatttttttcgttttgctcttcgccatgtgccaatcgctcctttttcccttttctttatcataacaaaaaaatccagatgtgttcatgaatacggctcatgtttcgaccggtaagcgcgcagagacgttttggcagatgaatagctccccatggcggcgtatccgtaaaaaaaccccataaaaatccccgcatacacgtgttcatgatgaccgaaaacgatagacacaacatttccggcagcaagggcaatcgtgggaacgaatatgcccggaacccggcagaacactttgaccagctgtgtgacgcataagacgaccggcacgccgatcacagcatcccaaatatttgtatggatcagcggaaaataatccacatcgacacctctttattccgtcttttgctatctgttagcctgcctaagaattccgcttcctattcatgataaaaaaacagcaccggcacatgtccggtactgtaaaagttgtttattttcctgccgcggcccgttctacggctgctgatacggcttgatgcacgtccgcatccaaaggctgaggcacgagatcgccgtgtttcgtgcaagaggcgatggcttctgcggccgccacaagcatttcatggtcgattttcttgcttttggcgttcagcgcgccgcggaaaatccccgggaagccgagaacattattgaccgaacggccgtcagctgcataagcggctccggcttgtaatgcctcttccggttcaatctccggtttcggattagataaagccagaatgacgtgtccttttctgacatcctcttttttaatgagacccggaactcctgtggtgctgatcacaatgtcacacgtgtccattaattctttgatgcttccaagcggctgacctccgtactgagcgaggcggttcattgcgtcttctgacttgtccgttccgcagaccgctttgactccgtatgccataaacatgcggcagatggcgacgcctgccgcgccgagaccgatctgaccgaccttcgcttcttttaaatcaagaccggcgcttttacaagcggaaatggcggcggcgagcgtgacgaccgccgtgccgtgctggtcatcgtgcataaccggaatgtccagttcttctttcaggcggtcttcaatgtcaaagcagtggggcgaaccgatatcttcaagcagaattccgctgaaccccggagaaatatgttttaccgtgcgaatgatttcttccggatcagaggtatcgagcaaaatcggaattccgctgatacccgccagctggtcaaaaagcgcggctttcccttccattacgggcattccggcgacagagccgatattgccgaggccgagaatcgccgttccgtcggtgacaatggcgacagaattgctgattgtcgtatagatggacgctttttcaggctcgttttcaatcagtcggcacacatcggcgacacccggcgtataaacacggccaagctcagccaatgtccggatcggcattttgcttttcatctgaattttgccgccttcatgagcagagagcacttcatctgagactgtatgaagccggatgccttcaccgagagcttcaatggcttgaatgatttcctgcagctgctcttcattttcggcctgcaccgtgatgttgcgcattgtgtagttcgggccgactttaacggtttcaacttccccgatatctccgcccatcactccgatggcggttgccacttttccgagatttccgggaacagtcggcgtttcaatcattaacgtccgaatcatatgctttgtaatcatgaaatgaacctcctaacccaatttttgagattgcaaggatttttctttcgtgtaccaaatgaatttccccgtgtacccgtacaatattgccagtccgatagatacaaaactgagccacatgaacggcagataagaaaatgtggatacgccgagaatgccggccatatagatgccgttatcagaccacggcaccatccctgaagtaagcgtgccgcccacctctgcgttccgggataaaactcttctgtcaagtttcagtttatcataactgttctccatgattttcggcgtcaggatcaatgacacgtacatcgcacagccgaaaatgtttcctaaaagggcgacgatcaatgtcgaaagcgtcacatttcccggtgtggtcagctttttctcaaaagttgagacaatcacttttaatacgccgagcttctcaagaattcctccaaaaccaagaccgaacaggataacgactaacgtatccagcataccggtaatgcctccgcggtttaacaggccatttaaaaattcgacgtccgttttaatagaaaaaccattataagcagtcgcgatggcactggcaaaattcattccctgaaagacggaagcccagattgcgccaagcaaagcaccgatgataataacgggcatagacggctttttcaaaatcagaaggacaacgacgacaacagccggaatgagcatccatatatgaatgtcaaatgttttctgcaatgaagattttaaaaattccactttgtcgagatcaatattttttccgccgtatataaatcccgttacggtaaacagaatggccgtaataatataggacggaattgacagatacatcatcgctctgacgtgtgacagcacatccaccttagaaagcgtggaggcaagcaccgtactgtcagacagcggtgaaagcttgtctccgaagtaagcgccggacaaaacggctcccgctacgatcggaagcggtatacccattccctctccgatggcaatcatggcgattcccgcggttcccacggttccccaggacgttccggtcgcaacggacataacggaacaaataaccagtgtagccagaaggaaaacatgaggattaataaactctaaaccataataaattaacgtcggcacaacgccgccggcaatccatgtcccgatgagcgcaccgaccgaaacaagaatcaacaccgcttcaagaccgtttgatatcccggtgacaatcgaatcctgcaagtctttatatgaatatcccagcctgactccgagaataatagcgaaaaaccaggatattaatagagctagctggatcggcaggtctaaaaacactgtgaacgataagacaagtgctaaaaacccgaataataagataataatttccaataaatttggcaatctgacctctttcacaagaaaatccccctagaagaaaaaagctaaaacgctttcatcaaatgatataacaaattatactatactgcctcatccctttgtatggcaaccgcctattcactaaaaaacgtgaaaaggcggctgttgttgctttaaaatttatttttctaatagatcttttccggcaatccccggttttgtcatttcatacggattcaaaatgatatccaattcttcttctgtcagtacatcattttgaaggcaaagatctcttacagattgccccgtcatgattgcttcacgggcaattcgcgcagccgcttcatacccaaggtgcggattgaccgctgtaatgacgccgacgcttttttccacgtattgcttcagacgtttttcgttggcttcaattcccgccagacaatgatcggtaaatgaacggaacccgttattcatgatgctgatggattgaagcaggttaaatacgagtaccggctccattacgttaagctccagctggcccgcttctgaagcgaggcagatcgtattgtcattcccgatgacctggaaggcgatttggttgatcagctctgccattacagggttgactttcccaggcataatagatgatcccggctgacgggcgggcaatgaaatttccgcaagtcccgcgcgcggacctgaagccattaagcgcagatcgttggcgattttagacatgttcatcatgcatactttcaacgcggctgaaacttccgtatacgcatcagtgttttgtgtggcgtcaaccaaatggccggcgccgacaagcggcagtccgctgatgtcagccaggtgcttcacaacctgttctatgtagcgcggatcggcgttaagtcccgtacctacggccgttgcccccatgtttacttcatacagatgctggcgggattgtttaattcgctttatgtcacgctcaagcacgcggctgtatgcttcaaattcctgtccgagacggatcggcacagcgtcctgaaggtgtgtgcgccccattttaatgacagaatcaaattgtttcgctttatctttaaagacactgagcatatgcgccatcgtatcaaggagcttatccaaaagtttcaaggttgaaatatggattgccgtcgggaacacgtcgttcgtcgattgtgacatgttgacgtgtgtgttcgggctgaggtgaatgtattcaccttttttatgccccatgatttcaagagccctgttgccgattacttcgttggcattcatgttcatggacgttccggctcccccttggatcggatcgacgataaattggtcatgccattttccctcaagtatttcatctgcggcctgtacaatcgcatttccgattccttcatacagccgttttacatccatgttggcaagcgccgccgcttttttgacgatggcgagcgcattaatcatttcttcgtggatgcggtagccggtaatcggaaagttttctttcgcgcgcagcgtttgtattccgtaatacacatcagcttcaatttgtttttctccgaggaaatctttttcctgacgatattctttttgcgcgtttgtcatgctaaaaccctactttctctttgtggtagtcatgtttttacagtacaacgtcgtctgcgatcggtgtctccataatgtttttgacttcagccaagttgtgagactggccgagcgcccacattaatttcggcacgatggcttccgtgttcatatttctggagcggataatgagatcttgattgactcttcggccgacttcatagacgctcatgtcctctccttcttcaagacattgtgtcgtaatgacgacgacaatgccgctttcaatcatttcattgactttggcgagaatgtctcttccttcaaaaggcacgccgccgctgccgtagctttcaatgacgattcctttgtacatgccctttaatgcgtcaaacatttccggtttcagccccgggtggagcttgagcaggcacacgtccgtgcaaagtgaagtattgaccgtaaaagcatcgtcttttgggatgtgcacttgtttgttgtattcaattccgttttcggtaataaacgcgatatacggatagttaatgctctcaaatgcatcatagcttttcgttcttaatttaatggcgcgtgtgccttgaatgactctgccgtcaaatacgacgtatacgccgcctaccccttcacatgcgaagcggatcgcgtccgtgatattttttttggcatcggttttttgaaatgtaatcgggatttgcgaacccgtaatgacgatcggtttatcagcatgctgaagcatataagacagtgccgctgatgtataagccattgtgtctgtcccgtgcgtaatgacgaacccgtcatatgcgtcatatttttctttgacagcatttgcgatttcggcccagtattcaggctgcatatttgtgctgtcgatgttcattaacgaatgggtttccatcgtgtaatcgttatcaagttttgatacgtaggttaacaattcgtctgctttcaccccgggtgcaagcccgttttctccttcgactgaggcgattgttcctccggttgttaacagcaataattttttcataccctgcacctcttcatccatttctcaagatgtgttaagcattcgcttttcgcatacttttaatcaaattatagacagacgaatgaaattaatcaagtgattattattcaattcgcgtacacttttgcatatcgatatgatataatttgctcaagtgaaaaggagcggttttgaatatgaatttagatcgtttaactgaactgagaaaaaagaaaaattggtctcttcaatatacggctgatcgtctcggcatcgccaaaagcacgtacgccgggtatgaatcaggataccggcggccgtcattcgaggcgctgggcacgcttgccgatctgtttgacacgacgtgcgacgatttactcgggcgcactgaaaaaaaggcggagccgtttgcccagaccatcgaattaacaaacgccgcacaaggccgcggcacactgaccgttgacggacagccgctgaaccaggatgaaatcatcgaattgattgcgtttgtccggacgaaaaagaaggtgcaggaggagctccgctaaaaaccggcttttacggcttgattctgccgtacgtccctccgcccccggcctcaaggacgagctgcccggtacgcgctttatgaatgacagccgctattttaggctggacgacacgcgccaattcctcttcttgcgcctgatgaagaatcgccatctccgtcccgaaggcccgcttcagtttttctaacgttttcggcccgaccccgggaatgaactgcagcgggatttgatgaatatacggcggccgcggcatgcggctttttttcggtccgctcagttcctccagccgttcactgaccccttttgtcattgtttcccccccgcactccggacatgcggaagctcctttttcaaccgggctgccgcagcggtcgcaagccgtccggtaatacttcccgagcttcgggttcagcccgtaattcgccgtgatttttcttccgtctttcccttttaaagccagcgaaaattccgtgaaattcgcttctttaagaagcatttcattatattctctgccaatttttcctaaggaatgcgcatcagaatttgttaaaaatgtatacggatcaagttctgttacccgcgaagccatgtcggtgtcacagcttaatccgagttccgccgcgtcaatgagcgccgggtcgaaaacttctgtcaaagaagatatgactccttttccgtacaggcttttatgcggggtgaacatatgggcgggaataaacagcccgcccaattcctttgttttcctttgaagattcaaaccggtttcataaatgcgctgggaactgagatggatatttttaagcctttttgcaagccactcagaaaacatcttcatttcggcaagagacggcataaagacgagaacgtgaatcggcccgcggcatgtgtgatcatagatttcaagctcactgcccaacagaagcgtcgtattccgataccggatgccgccttctttcagctcacggtatccgccttcatcaattccgcgctcgatttcttctatgacttccggggaatggcagtcgatgatgcccaatagttcaattcccttcccctcactggcttcttctaaaatccggtgcagcgtcaacgttttggccccggtgattttgaccggttttcccgtataagtgcggccgatatgaatatgcagatccgcatagatggttttcatcatttttccttcagcgctgctttcagctggagatactgaatcgcgtacgccgtttttgcgtcatacaccctgcgggattcaatcagcttcacagcctcttcaagcgtgacctgcatgacttcgacaaattcatcctcatccagctctcgtttttcttccagcggcgaaagcccttccgcaagaaagagatgcacgatttcatcagcaaacccgggtgatgtataaaaagcggtgattttcgtcaaggtttccgccgtatatcccgtttcttcctcgagctctcttaacgccgtatgttccggctcttcccccttttcaagcttcccggccggaatttcaacgattgtccgttccagcggctttctgaactggttcaccaaaatgatttttccttcctcggtcaccgcaagtacggccactgctcccggatgtttgacgatttcccgcttgcttgtttttccgttcgggagctctacatcctctaagtaaagatctatgactttcccgtcatacagcttttttttcgcaagtgttttttcttctaaatgtttcatcatgtcatctcccgttctgtctctctattatgcctcatatattttatcatacatgcatgagagggaggtgcttttcgattgaaggtgtaccggaaggataagagtatcgtattggtcggaaaggcgtgggaagtgcgggctaaactgaaagaatacggacggacattccgctatgtcggagattggatcaccgggccttaacagttgaaaacttcgcgcctttatattacggtcaataaaagactataaaaaggagcgaaacgatgagaaaacgcacactgggacattctgatttagaaataagcgaaatcgggctaggctgtatgtcgctgggcacggataaagctaaagcgctgtctattttggatgaagcgatcgagcttggaatcaattatttagataccgctgatctttatgatttcggcagaaatgaggaaattgtcggggaggccgtcaaaaaccgcaggcacgacatcattttagccacgaaagccggaaaccgctggaatgatgataaagacggctggcattgggacgcttccaaaggatacataaaagaagcggtcaaaaacagcctgcgccggctgaaaacggactatatcgacctttatcagctgcatggcggcacgatggaagaccatattgacgaaacgatcgaagcatttgaggacttaaaacaggaaggtgtcatccggtattacggcatttcctcgattcgtccgaatgttattaaagaatatgtgaaaaaatcaaatatcaccagcgttatgatgcaatacagcctgctggaccggcgtcccgaggagtggcttccccttttagaggagaacggaatcagcgtagtcgcaagagggcctgtcgctaaagggcttcttacggaaaaaccgcttgatcaagcggccgcaagcgtaaaagagaacggctatttaacatattcttttgcagaactgtcagaaaccaaaaaagcgatcagcgctgccgcacctgacttgagcatgacggagctttctcttcaatacttgctgtcacagcaggccgtcgcttctgtcatcaccggagccagctcacttgagcagctgagagaaaactgttcggctgcagaggcccggcgtttaagcagccaggaaatcaaagccctgcaataccatacaaaacgggacgtatacgaagcccatcgttcttaaataataaaaccggcaccttgtcagatgccggtttatttatatttgtgccaatcgagactgctttcattcagcagctcttcaaagcttttatgtttttctttttcttttcgttttctgatttgttccgccttttgctgcgcctgttttctctcgtcttcttccttcagctcacttttcatttgcaaaagcctggccttcagatcttcctccagatcgtcttttaagctgtgtttttctttaggcagctgctttttcatcattacgccccccgtatctgaatatggtgaagcaagtgtaccacggagcgccggaggccggcaacgttcacggtcctgaaaagccggagagctaccgtaaagccgttcaaacctttttagataccatgacgcaaacgtaaaaaagcgaaagaacgtatgctggttctttcgctttcacgtcataaaacgtcggtaatcccgtccatattttctccgatccagtcaatggcgaggtcgattgtcataaactcctgcgctttgaaggtcatctcatcttgaagcagccagacatccttctgaacggattcagcgcctccgatggaccagtgcagcagactgtacgggtggttgttgttcagaaaggatacccacgttttatgctgtgccgtctgtttaatggctttcagcttttgattcactttccgtttctccctgctttactaatatgctcattctcgggctcagcatctctgccgggctttttaagacgagcgtttttgccttttcattgtaatcgattgtcatttcctcgtcaaaaaacactttttgtgaggtctggatgtaaagcggaagtccgttggtttcaatggcttcgcattgtcccgttaattcgtccgccagccagatggtcggcacgccgctcaccgcgcacccgcagccttctgcgtcatagcggagctgcgcttttttccccgggttggcgtccattgcctgctgaagtgtgtgtttcgccgcatccgtcacatgtatttgcatagatgatcctccgtttttcattttcgccattgtagcataccgagccgctgtatgcattgtttctgctttctttacagcagcccgctctcccagacctttgcctcttgttcagccgccttgatccagtcatttttcccttcactatactttgccatatcgtatgggtacgtcttagcgaggtgccgtttcagttccatgtattgatccgctttttcaggctttgcggtgaggtaatcccggaacagcagatgacgcttcacgtccggatgccctgtttcgtatatgtgaacgtggtgtgtgcgcttgctgccgcctttttgaaagaaacgccggccctctagcccgttttcccctttcgcctcatagccgagtgcttccagctgcggactgaatcggtcagcgtccgaaatatctttaacctccgccagtatatcgatgacgggtttggcggtcatccccgggatggaggtgctgccgatgtggctgacagaatgaagtgctgggccgaagattcggatcaagtccgccttctctctttcaaacattcctttccattccggcttgtacggaacaacttccgctttcctcttcggataaagatgaaaaaacgagagggtcagcccttccggcgtctctatctgtccggcttctgtgaacccggtttttaaatagagagagactgccggaacgttttggctggcggtagccgcctctattttttgggcgtcccggttctcgtctatcacaaattgaataagcgcccgtccgattccttttcgaaagccggacgggtgcaccgtcagcctgcatatgacaaggtcatatccctttttttcatacgaaatgacgcctgcaagctgatctttttccttgaaaccggcaaacgtctcccgtgaccgctgtatatcatcgggtgtttcatgcaaggcggggatgccgaaaaagccgatcagctctgcttctttttgataagagcagcgctgaaccgccgcaatttcccgcgcggtctgttcttgtgtatgctgtaaaaatgtaatcaatcttccgccccttttgacgcaaacatccgctgtgactccgtcttcgtaatgcggaccgcgtacgcttcataccaggcggtttttcctttttgttttgccgcctggtggtcagtatgatctttccaccttttaatcgcctccaggctgtcccagtaggaaaccgtgatgccgcagccgttttcctcccgaacgctttccgcgcctaaaaagcccggctgtccgcctgccaaattcatcatgcgctctgccgtatgttcatattcctcatcatattttccctttattgatgaaaaaatgaccgcataataaggcggtttgggcgtgtcagctaaaaaacccatattcatccccctctacatatatttcacaaacagaatccggtcttctcccggaccgtcataattcgcaaaaacagggattccgtttacggttttggttcctttttcagcttcaaagcctaattttgtatgataagcgattgatactttattgacaggcgccgtcacgcaattgacttttgtgcagcccctttttttcaccgtctccataaatcgatcgtagagctgttttccaatttgcatttttctgaaatccggatgcacaccggaaaaatgaatgtaggctgtctcagggtctgattgtgactgaaaaccgattaaaaaaccggtcattccctccggcccgtacgtgataaagcttgtgtcctgaaaatgttcaaaaaacaagcgcggcagtttgtctttcatctgcctgccgccccaccattcattcaaaacagacgtaaccatttcatagtcttcagaggtaattgttcgaatatccattatcgattgactctccttttcgtccggcaaaatgaatgtcagctcttctcattggaatataaaaaattatatgtgggttgtttgcaattgtaaatgatttcttttcaagcaaacgaatcagcacgtcttccagccagggaatgatttaccagtataaacgtgatcattgttcgggtacaatgaaaaacagaacaaatgttcccggaggtttttttatggctgatattcttcttgtagatatgcaatcgttttatgcgtctgtggaaaaagcggaagcgcctcatctcaaaagccggcccgtgattgtctcgggagatcccgaaagacgcagcggcgtcgtgcttgcggcttgtccgctcgccaaacgatacggcgtaaaaaatgccgaacggctgtgggaagcgcaggccaaatgtcccgatgccgttattgtccgtccgcggatgcagcggtatattgatgtatccgtcatgattaccgaactgtttgaacggtataccgatcttgtagaaccctactccatcgatgagcagtttctcgacgtgaccggaagcagacggctgttcggtgatccttttacaattgccaaaagcattcagcaagcgattatgcgtgaattcggaatttatgcccgtgtcggcatcgggccgaataaggcgctcgcgaaaatggcttgcgaccattttgccaaaaaaaacgcatccggcatccacagattggatatgtcaaatatcaggcaggatctgtggccgctgccggtcggaaaattattcggcatcggaaaacggatggagcatcatttaagacggatgggcatcagcacaatcggcgggcttgccggacaccccgccgaattgctgaaaaaacgctggggcattaacggcgaattgcttcagcggacagcccgcggcatcgatccctctccggtcaccgtcaacacgcacagccggcaaaaagcgatcggccataacatgaccctcccgagagactacagccgctttgaggatatcaaagtcgtgctgctggagttaagcgaagaagtggcccgccgcgcccgtttcaaacaatacatcggccatacggtttcggtcagcatcagaggcgctgattttgaattcccttcaggttttcacagacagagaaagctggtgtcaccgactaatttcggaatggatatttttaaaacggcggtcaagctcttcaaagagcattggaacggtgagcccgtccgcagcgccggcgtctccctttcccagctggagccttgtgattatgttcagctgagcctgttcgatgctcaggaaaaaaagatcagtctcggcaaagtattggatgatattcatgagcggtacggccctgcgtcgctcctccatgccgcttcactgacagaggccggccaagcctttcaccgggctgaaaaaatcggcgggcattacaaataatttgaggtgatatacatgaatccgaacaaattaacacccgggtataatgtcatgtgggaatcaagccggatgatgctgcccgaacatcgggagcagctgcttgcaaaaaaacgaaaagaacgggaattccggcctccggaactgagcgaagagcaactgaacgacatgaaccgcatcattgcggcgtcaattgaagaagacagggccatttcggtcacctacgcttccgcacacggcccccgccgcttttggggctgggtaaaacaagtgatgcatgacgaaaagcgtttaaaaatcataaacgatgaagatgcgttaacgctgccgtttcatcgtattctctcggctgaactggaataaaagcctaaatcgtcctgacagaaaatatgatagaagagtgggaggatcacatgatatttagtagaataaagatgaatgacaagaataggagaatatatgatggatcaatttatagaaaaaatgctgggacaagccctccgccagtatggacggaatgtgtcgacagatccgctgagcccctatgaaaaacagagtttaaaaaaagctttagaagaaagaaggaatgaagaacccgatgaggatctccatgcccatgtagaagatattatctacgattacgtcaccaatcaggggcagttttcctgacacggacgtttatgcaccgggcgataagggaaatgtccgagagtaaacccttaaagattgcgtggtgcaggatatgcctgtcgggccttattttaggatcggctatgccgttcttctgttatttctcatcatttatctcggaacattaatagactttttgttccagcctgttgtgattacggttaaaaccttgtttccgcccattgtattatcgggcgtcctttactatttgtgccgcccgctcgtcagagtgctgcatgcgaaattaaagctgcccgaaggaatcgcgattttagcgatttatgcgggaacagccggcctttttgtcctcttcctttatacggcgggccctgccgttcaaaaacagtttacagccttcacagatcatattccggagctttccgcaaaagctgaaaattggatcgggcatctccaggacagcaaatggttttcccggcttcagcatggggattcctttaaaaaattagcagacaaagccgcaaattattccggttcaatcgctgattctctcagcagcctggccggtacggctgccaatgccgccatcaccgccgccattattccgtttgcgctgtattacatgttaaaagaaggaaacaaagccccccggcgactgctgcggcttcttccggaaaaacatcaaaaagaaggaaaacaaatccttcgggacatggatgaagctctcagttcatacatacaaggacagctgcttgtcagtttctgtgtcggcgttctcgtcacaatcggctattttataatcgggctcgattatccgctcgttctgggcgcgttcgccatggtgacaaacctgattccgtttatcgggccttggatcggcacatttcccggagtcattgtcggattgttcgattcaccgaccgaggcggtgctggtggttacggtcgtcgtcattgtccagcagcttgaaagccagctgatttccccgcaaattatgggacggaagctggacattcacccgctgaccattatttttcttctgcttgccgccggcaaattctcaggaattgccgggatgcttctggccattccgggatatgcggccgcaaaagtggtcataagccacatgcagaaactgttcattctcagaaaaaaacaaagctaggagagaaatgattcatcccccatgtcttcacatcggtcaaaatgaaaaaacggcgggctgaagaagcccgccgcacacggaggtaaaaaagatgaacatcggtgatgtcatttttcaattgatttcatttattgcagccgcggttttcctgtttgccgtgatatacgtattcagaagcttgaacaagcgccgcgtacaattggacagaatcgaaaagaaactcgacgcggcgctgcgcgaagaaaaaaacgaaaagttatagttcattcagaagcaggagcaacgagctccacttttatccgatccgggtcctccgtgtatacggcgtaatgcgtgcttccgcctgcatatggatggcggtccctgtaaagcacggggcatcctctggcaagcagcttttctgtcatctcgtcaacctgctctcttgatgcagcatgaaaagccagatggttcagcccgacccggcatctgtggtactccggtgttaaaaaacgctcctctgtctgtacaagcacaacataaaatcctgcgtttttccagctgatgccggagtcccaattttgaaattccctataaccgagctcacctaaaaaccatccccaaaaccgggcggaggctttcaagtcagatacatacaactcaatatggtgtatcataatattcgcttcctcctcacatcacacccgccttaccagcacctcttcaactttatggccgtcaccttttctcagaatcaaatccgatctgaattttgtcggcagaatattttcatacagattcggacggttgacgctctcccaaatggaggcggccatggtatccgcttctgcatcagacaaatccttaaatttatgaaaataagaagccggatcctgaaaagcggtttctcttaagaggcggaaacgctccaaataccacgtgaaaatccggctttcttcggcatccacatagatcgaaaaatcaaagaaatccgatacaaaaatccgcggatcttccctgtcgtcctctaaggtcggcgactgcaggacattgattccttcgataataacgatatccgcaccttcgacaacctcgacggcgccctcttccctgtcatacgtaagatgggaatatacgggcgcctccactctctctttccccgactttatatcgttcagaaactcaagcagcgctttcacgtcgtagctttccgggaatccctttctggacagaaggtttttcctttttaattccgccgtcggatacaagaaaccgtcggttgtcaccaggctcaccttcggcctgtccggcagacgggaaagaagcttttgcaaaattctcgccgtcgtgcttttgccgacggcgacactgcccgcgattccgatgataaacgggattttcgctgaatgcggatgcttcagaaacacattgacatgctgattccgtcttgcggcagacgtaacatgaagatggagcaggcgcacaagcggaatgtaaatcgtttctacttcttccaccgacaggtagtcattcagcccctctacggccttggcttcttcctctgaaacggcaatggaaagatggccgccgaatccggcccacgactcgcggctgtgctgcgtatacaatgtatgtaagttcaattctttacttttcacaattcacaccaatctctctgtatggctttccgataaaaaaacaaacgcttacaaagattgtaacggaaaaccgcttcactgtctgcccatttttttcaaaaatgaggaaccgatccggctgtactcttccatttcctcctccggaaccatgcttccgccggtgctccacacaaggtgcacggcattttccatctcaagcccccgctcttttatataacggtttccggcttcggtctgaacgatcttgacggctccggccagtccggcgagtgcagagggttcaaggctcttattctcggccgcccttaattgataaagcagcgaaaaaagcgtgccgtcatcggcggtataacagccgctgattataggctccatcagagggccggccagcccggacggccttcccaccgcgagtccgtcggcggccgtttgattatcaagaccgatatcctgcacgctgattccgtcatgcaagccggaaaacagtcctaacagcatacacggtgaatgcgtcggctcaccgaaaaaaatatggacatgcccgccatagatcagctttagcgcaagcgcgacgccgcccggacctcctccgaccccgcacggcaaataaacgaaaagcggttcatctgcatcaggctttatgttcatttgatcgagctgctttttcacacggcttcccgcaacggcataccccaaaaacagatcccgggaatgctcatcatcaataaaataacaataagggtcctgcttcgcctgaatgcgcccctctttgacagccagactgtagtctgcttcatattcgatgacgcgaacccccttttcccggagcagctcctttttccactgctttgcgtcactggacatatgaacggtcacacaaaagccgagcttcgcgccgattatgccgatactcagacctaaattgcccgtagagccgacggctatagagtattttgagaaaaaagcggtaaaccgttcttcagtcaatatgctgtaatcgtcgtctgctgagagcattcccgcttttaccgcgagatcttcggcatgcttcagcacttcgtaaatcccgccgcgcgctttaatggaaccggaaatcggaagttcgtcgtcgcatttcaaaagcagacgcccggggaaagcctgagcggcgctgtgttccagatgcttcttcatttcattaatcaagacaagcggagattcaatgaggcctccctccgcttccgtctccggaaaagccgacgcgatataaggcgcaaatcggcgcagcctttcttccgcttcggcaatctcctttttccattcagcgccatgctttactggatcatcggttttatgcggattgatccaaaatacttcacgcgcctccgccatttgcctgactaaaggctctgccatcaatgccttgtgtatatcccggtcggacattcctttttcccccttgttactttttctttaatgcgcggccggccagtttttctgtaaacgatgggaaaagctgatacagcttcgtcccgaggctcatccatcgcggaagattcatttcccgtttatccgtcagaatcacggatgtaatgcgctctgccacatggtcggcatcaagcatccatctgccgacgcttttcacataaccgccctctttatctgcaattgtaaagaagtctgttttgatcggaccgggattaaccgttgtcacggctacacccgtaccggccagctcaagccgcagcgcattggaataccctaacacggcgtgcttcgttgcggaataaaggcttgatttcggcgtcgccaatttgccggcctgtgaggcgatattgataatatggccgcttttcgcatgaagcatcacaggaagacaggccttcgtacaggcgattaatccgaagacgttgacttcaaacattgccttcatatcatccaaagatgaatcagcggccgtttcaaaaatgccgaagccggcgttgttgattaatacgtcaacatgaccgatcaaacgccttacgttttcagcctcttctgcatgccggacgtcaaacggaacgacatcacactgtccgccgcgcgcggtaatcgtctttttcacttcctgcaagcggtcctcccgcctggcggataaaaaaacatgagccccttctgccgcgcaggaatatgcaagccgttctccgagtccgccggatgctccggtgatccaaatccgcttatccgttaatctgcccatttccttcaccccttcacagctttaaacttcagagtgttccccgactgaaaggatacagccttcccttcggcggccagcacgtcaagatggccgatcgtttctgacatcgttaaaaacaattcattttcatacacagccggaaacagccgccggcatacctggaaagccgtcagcgtttcctctgacaacaggcgcagcacatattccgaccggtttctctgtttttcaagccgcctgtcaaaagcaggctttacgtctgtcagcagatcgccgtgtcccggatataaaaaggacgggtttacgtcataaagccgcttcattgagttcaagtagtcgagcatcggggccgcgcgcacgccccccttttccggagcttccagaatcggattggtggagctgttggataaaagcagatcgccgctgaacatttcaccgcttttttcatggtagagcgcaatgtgagaagcggcatgacccgggatttcgagcaccgtccagccgttaagcccgtcaatttttccgccttccctcactgttttcgttaacggacggtttgcagaaaataagtatgacagcttaactgttttatgtatgtcttcaggcgtcaggggaacgtccatttcagtcataagcgacagaaaaaagtcctcctgccgggcgatatacgactgatcctgagtaatgtacctgtcattcagcggatgccctattacttccgcatcatcggaaaaaaggtgcagcagacctgaatgatctgcgtgatgatgagtgagcaccacctgttctatatctgccgcagaaacgccgtgttccttaagctgcaatgagagcgattcagccgcttcctttgtattcgggccgcaatcaataagggttaaggcttcatcttttactaaataaacgataacgtcgccgactgcaaacggagtcggcacacgtatcggaatgatctttctcgctgccatgtttacgctccttcgttcttttcattcctgaataatcatattttagcgttttcttttcactgtgtcattattgccgcatatcggaaaaaaagattgacatcccgctcttgcgcatagcataatgaacaacaaactagaaaacacggaacgcgatgacgaggaactagtatataaacaacggcagcagagagcaatgtccccggctgaaagacattgcggccctcttgtttacagaacctgccctcagagcggttaggaaaacctaaacgtatcccctcgttacgggatttgagctgagcacggctgattcgtgctaatgtaaggtggtaccgcgaaaccttttcgtcctttttgacgggaaggtttttttgtgttttgagaagaaggaggatttatatgaagaaaatcggttttatcggggccggatcaatggcggaagcaatggtgaacggactgctgcaaagcggaatgacagcccccggacatatatatatgacaaaccggtcaaatgacagccggcttgaagagctccaaaaaacgtacggagtgaaaccgtgccgggataaagaagagtttttcagcaataccgacattatcgttctcgcctttaaaccgaaagatgcggcagaaagcattgagaacattcgcgaatacgtgaaagatcagcttgtgatttctgtcatcgcagggctgacgattcacacgattcagcaatatttcggcagaaagctcaccatcatccgggcgatgccgaatacatccgcggccattcagcaatcggcgaccggtttttccgcaagctccgaggcgagtgaagctgaaatccggacggcaaaagagcttctggaaaccatcggagaagcgacgcgctttgaagaaaaacaccttgacgccgtcacagccattgccggaagcggtcccgcctatgtgtaccggtatgtcgaagcaatggaaaaggccgccctacaagccggcctgccggaagaaacggcaaaagagctgattttacaaaccatggccggggcgacggaaatgctcagaacaagcagcaaacggcctgaacgcctgcgcaaggaaatcacaagcccgggcggcacgactgaagcaggccttcgcgcattagaagagcgccgctttgaagaagccatcatgcactgcatcgcagaaaccgcagcacggagcgccaaaattaaagaacaattcgcaggctccgttctgcaaaagacagaccagtgataaagcatggggcttcccatgcttttttcattctgtttaactgccgtataagcggctgattctctcttttacttcaggaagatggaatgtggcttcgtgcatgttcacctcttcctcaaccgcttttgtcagctctcttttgatccgtgcggtcacattggttttcagcgcaaccagtgaggctctcggtttatccgccagcagccgggctaattcgcggcctctttgaaggacgtcttttttcggcagcacttcaaacggaactccccgtttttccagagcggcgccgctgaaattcgcggcagtaaacagcatttcttccccgaggacaattcccagtttttcaggcacaatatacgtcgcgcccattcccggtgtaaatccgtacttcatataattacaagaataaaaactctctctgcttaaaatcacaaaatccgagctcagaccgatcgtaaagccggctccgatcgcatgcccctgcatgacggaaatcacgggaatcctgcaatccaataaaagactgtgaagctttaaatctgtaaattggagctttccgctctgaatggtcaaaagcccctcctgcgttcctcccgtgcagaaataatttccgtaacccgtcagaaggacggttttataggacggatgggcattgatgtcttggaatacccggtgcagctctctgacaaactcttctgacagcccgtttttcccggccgtatcctgcattgtgacctgcacaatgcccggttctgtttcctgtacatcaatcattggattcatgtttattctccgtttctttaaaaatactcaagcctttccggctctgagtgtttctgatattaagtcgtccattcatactttctgtgaaactcttttatttcagtcagcaccaatcgcgtttttccttgatgcgcattcgggatgtctgctgcgggcgcggcatttcttgtgccgaattttacaatgccgctgtcttggagcagccggtcgtaatcagccatcgataaacggacgcgttcatccaaatgccggctgatttgaaattggttctgccgcgtacggctttgcggcataacgacaccgctgtaaaattcagagcagcagcccgaaccgtatgaaaaacagccgacgcgtttcggcgtttcaaaagagccgttatcaatcgtgctggcaagagataaaaatacggtagcccccatgatgttgccgacgcgctggcagtattgaatcccaggcagcacgcgttgctgaaaatccgcttcaatgtcttgcggcttagcctttgccaattttctcatcatcgtccgatgcgctccttttaccattccgccaaacggagtatgaaaagaaaggtattgaaatgtattcttataatccgccccgctcacacgctttcggtattcctgaaatgatttttcacagcagtccaaataagacatgagcgacagatcagcatcccccgcttcactatccggaatcgggcggcacgtatccatgacttcatacccgtaatacccgcttgcgccttgatcaagcaaaaagacatgaggggtgctgctgactaaaagcgccacagctcccgcccccgcactcggttcggcataggaccattcctccgtcaacgcgtcaccgccttcagccactaaaaagcgggaaatatccgttccgatgatgagcgctttcgctcccggcgatgtttgcgataagatgaaattcacgcccatttgaaacccggccgttaaagaatagcaagcctgtttcacctcaaataaccggcaattccgcttcagctgcaaataatcatggacatatgtactgatggatttgccaaaatcaatcccggattccgtacaggtgatgaccatttcaatctgattccgttcctcttctgacagagagtcgataatcggttttgcggcatttacggcgaacgtaatcggatcttcaaacggaagcgccactactttttctttcatcagcaggttctcaaacctttttttatccaggttccgatgttccgcaagctccatgacgtctacatacgcggttccgccaaacacgttcattgcttcgattcctacattcatttctccaagcccccagagtaaagaggcttcctgtggaagcctcttttatttttccgttcaaaactcaacaagcagcctgtcaacgccgtgaaatacagggctcggaaccagattcggctcttgatcctcagtaaaacgccatgcggacatctgttcaaaaaagtgggaaagcgcgattttcgcttcaagccgggccagcggcgctcctaaacaataatgactgccctgaccgaatgacagatgctgattcggctttcgtcccaagtcaatctgatcggcattttcaaacttcttttcatctctgttcgccgatccaatccacgcatacactttttctccggccggaatcgtttttccgccaatctcgctttcaaccgcggtgtagcgggttacccgctgaatggaaggtctgaggcggatgacttcctcaataaagtcaggaaggagcgccttgttttcaagcagccggggcagaatgtgcgggaactccttgagactgagaaatgaatttccgatcacattttccgtcgttacgtgccccgcgacgatcaacaagccgcaaaaaccgattaattgcttgtctgacagcggctctccgtctaaatcagctgaaattaaatggctgattaaatcattttgcggctgttttctccgctgtaaaataaactgcatgaagtatccgatcatctgcttttgcacttcattcattttcttttcatcttttacattctggctttggtcgacccagcttttaaagatatctctgtctttcggagggaatcctaaaagctctgcgatcacgataatcggaagcggaaatgcgtaatcttcaataatgtccatcctgccttttgaacggacggcctgaagcaggtcatcagcgatagcggctatacgcggtgcaagagtctcaaccgatttcggcatgaacggctgattgaccaattttctgaagacggtgtgttcaggcgggtccattttcaaaaggctgtctttgttaatatgccggatcattttttcctgtttgtccgcacttaagtatttatgatcggaagaaaaatgactgtagtcagaaatcacccgcttcacttcatcataggtgaagatttcccagcaatcttccttttcattgtaatgaacgggagaggtttctctcatcgtttggtaccacttgtacggctgctgctgtctgatttttgttaaactggtcattttcattcctccaagatgtgtccaagatttgaaatgacccgccaaagcttacgagtaaacccggcgggcggatatgtgaatttacggtcttgttttggcgggctgcttcagcatctcaccatgcacgttcagtatcttttcctgcagctgcagaaagctgtattctgtcattccgtctgccgaatataaaacgccgcaaaattcagaaatcgtttcggctgcgctgtcttcagccaataacgtcatatgattggataccgccacatccatgatggcgatgtttgtcatatgctcttcccactggctccagtagttgacgaaatcagcggataaaatatcggccctgatcgtaaaatacggatcaagctcacccaagaaaataccgtttttatttcggaaataatagcatgtcaccccgttcggatccggaagcggcaggagttcgtaatcagtgatttcgtaagcgtcctgaacgtttatattctgcctgatcagatttttcaccaacgcgtccgtcttcgttaacccccgctgtttggcttttgcaattaattgctctaaaaatatgtcttcatgaagatcggcatctagttcatcacggtgaatcaaggtttcagaaatgcgttccggatgttgatagattggtgcaaataaagccatgttcaccgtctgcagcatcatatttttatcaaataattcatcaggaatgtttatttcccgcgcacccgccgagtcaaaggagtcgagcatgacgattgactcaacggtttctccagccagctgcaattgccgggtgacttcataagcgagcatgccccctaatgaatagccgcctacatcgtaaggaccccggggctgcacggtacgtatgagcttaacgtaatattcggccatgtttttaatgccgcggatcggttcccggtctgtcatccaccctcttgcctgaattccgtaaaaaggacgcccggtccgttcggcaacaggctggtacagctccactgcccccagcgcggaatgaaaccagaaaatcggtcttccctttccccccgggttaagacagatcagctcgggcggttcttgatcatctgtctcttctgatatatcgttttgtttcgtatgttcctcatgtacttcctcagtgtctttttggacagaaccagtcagatacccggctaatgttgcgattgtcgggtattcatagaccagatttgccgtaatagacgcttgataggttttattaatggactgaacccattccacaccgataatagaatccagccccatctcaatgaatgcctcatgctcatcaatatcttccggcttcagaaataggatctccgcaaggctttctttgagctctttgcgcaaagtgccgtcagagatgccggcaaggggagtttctgcttccgggatttgcggacgtaccgcggtttcctccgcttcagcattctcgggtttctttatttgtcctgctatatattccgcaagctcctcaagcgtcgggtgttcatacaccttattggcagtaatctcagtgtggtacgttttatttactgtttgtatccattcaaccccgataatggagtcaagccccatatcgatgaaaggctcatcagcatcaatatcttcccgtgacaaaaataaaatatctgccaggcttatcctcaactcttcaagcaatgttctattgtcttcggaaacggctttttccggctgttggacagaaacagtacaatccaaaggctgtaacacgattggcttttgcaatgtctccggttcaaacgctgtcatttcgatctcagttaaaggagtcagagaaatcagcccttcatgttcaggctgtggcgaagacgggagaacggtttgcgtttcagactttttcatggcttggcctggtaaagaactgtttacatcagccgcccaatacctttcttttaaaaacgggtaggccggcagcggcgttttataatattgtcctccgtcaaaaagccgtgtaaaaggaagatcataccctctgcaaaaaaggtcagcgatatgtgccaggttttctctgtactgtgcgggcgaagccgccgagcggcactgttcaatgcattccattccgaatgttttcattccggcttcttctgccggcttctgatccttcaaattggacataaacacacccggaagctctctttttacaagccactccgataatacccgcttcagttcgtccgcactgcttacgatacaggcaaaccggtgatgtaaatgctttctgccgagcaggagcgtataacttatatttcccagatcgctgtctttgttcttgctgagtgaatccagcaggcgttctgcctgaatttccagctgacgctccgtccgcgcagataaaggaatgaggcaggccggttttgccggcgaccggcgcacggtttgcggcgcctcttcaatcacaagatgggcatttgttccgctgaatccgaatgaactgatggcggctctgcgcggtgtatccggattccgttcccacggtatcagcttttcattcacaaaaaacgggctgtccgcaaattgaatatgctgattggcttgatgaaaatgcagggaagccggaatctgccgatgcttcagcgacagcaggattttaaacagtccggccatccccgcggccgcagcggcatgtccgagattggttttcacagagccgatggcgcaatatccttttttatccgtatagcggcggaaagcgcgcgttaaggcgccgaattcgatcgggtcgcccagtgcagtgcccgttccgtgagcttccaccatttgaatggtttccggatcaatgtgaaaagtatcatagacatgacgttccaatcgttcttgagaaagcgcgcttggagcggtgattccgtttgtagcgccgtcctgattcattgcagatccttttatgacgccgtacacatgatctccgtcactaacggcgtcgctaagacgtttcagcaccaccgctcccacgccttcacccggcacgaacccgtccgcgctttgatcaaacgtatggcagcgtccggtcggtgacagcatattcgccttatttgacgattgataaaaagcgggagtggattgaatgaaaaccccgcccgccaccgccatttccgtttctttcgtccagagcccctgacatgccaaatgaatggctgtcagcgaactggaacatgctgtatcaacagtgatcgccggcccttgtaaattaagatgataggcgatccttgccggagtgacggaattgtgattgccccaaaacgcctgcgcgggcccctgctgtttaaaaatggcctggtaatctccgccgcaggagccggcatacacgccgcattcccggcctcttaccgagtctcccgcatatcccgcatcttcaagcgctttccatgattcttccaaaaacagccgctgctgagggtccatataggtcgcttcacgtcccgatatatgaaagaaaacggggtcaaaacattcaatgtcctctataaaactgccatactggcattggctgtcagagacatcccatctgtctgcttttttaatcagatcccgcccggcggctaagtgttcccaaaactcatggacattctccgattcagcaaaccgcccgctcatcccgataatcgcgatcggttctttttcaggtaacacagctgctgattttactgtttcggccggatccttttgttcggggcggtacgtcatttgatacggctcagaaacgctgatgacgattttcccgatatttccgcggtcatccagacagtgatacgcttcttttatgtcttcaaaggaaaagatttttgagatgacaggctgaatgactccctcttcagccagccgctgcaattccaattgatagtccttgacctggtccggattttgaagggacagcttccgcaaatccacgctgtgaaacgattgattgttatgaaggacggacaagtcgactgatttagcggatttcagcgcagtcatggcaatttcgatatatcttccgcccggcgccaggcaattcattcctttttgcaaggcatcaccggccagggtattaatgacaacatccaccccacggccgccggtcattcgcatgatttccgtttcaaaatcttcttctaaatagcagatggtattgcggaccccgagcgaatgcaaatactcaatttttttctgtgatccggccgtggcatatatttccgcgccgatatgccgggccatttgcaccgcgatcagccccgttcctcccgtcgcggtctgaattaatattttttcgccttttttaagtccggctttccggaaggcgtctatcatggtcaccgccacggtgggaagagcgcatgcttcttcaaaggtcagccgggccggtttatgatagacttgttgttctttacatgtgatgagattcgcctgagatccaaattcctctcccatgccgacaatcacttcatcacctggaatgacggatgttacatgcctccctgtcttgatcacgacgccgcttgcttcaaatcccggagtgaacggataaggcggcatcgtcgggtacagccctctgatacaaagcaagtctccgaagtttaaagaaaaggcgcggacggctatttgaacctcgtcatcttttgtctcgggcatttcactgcgggcaatcgtcagatcttcaatgccgcccggacggtcaatcacaacccggaacattcccgagtcatcggactttgcgaaagaaggcggcatacgttcttgtttcggtttctgataaccgttttcctttctttccgtctgcagaggtttttcagcaggctgttcttcctgaagcgccgggcggattttcgctctatcggtcttcagagacgaggctatgatggtttcgtattcttccgagatataaccggtcagcagtttcacatgatagtaatcaaataaaatcgttgtctgcagtgtaagattcaatcgcttattaatctcgttaatcacattgacggccagaatggaatcaatgccgtattcagagaagttcagttcttcctgaatatcctcttctttcatttttaatacatcggcaatacttgttttgatgacagagcggacatgggaagcgaccgattccccatcagccttaacagcttgatgcacctctggcgcgcggctgcgggaaacaggctgcgcgggctttcggaaaacttcggccggggcggcgtatggctttctgccgtctctgatcccttgcatccgaacgagtccgtcactctcagctgcgataatctgctggcctaaatcatgagccgtttcagcagggaaacaaaccgctctgtatccttccgaatgcagcacacgctcccacgattttggatataggccgggacttcccggaatccgaagctcagcatcctcataggaccaccagccgtcaagcagcccgaaggttaaatgggtaaaaacagaacgatcgctgatttcgtttatcaaaatcatcccgttgtatttcaggagcgctttcagacggcgcagtgtcaaaccgatattttttgtggcgtgaagcacattggcggcgatgacaatatcgtaaacacccgttttgatattttgtgattcgcaaggctcctctgcattaaacaaggctgttgtcaaatacggcacatcaggtccgtattcctgttcggcatgcattaaaaaagctttagaaacgtccgtataacaatattccgcaatctgttttgcaaatggtttcagttttgtaaacagcatggcgctcgttccgcccgtcccggcccctacttctatcagcctgatacgggcatcggggtgttctgtaagataggctttcaggtaagcggccgcggaatctgctaacacttcattaaaataatccgcgacaggattatgcttataaacaccttcaacgagccgcattgatgaatcgggaaatacgatatccgtagccggacgttctccttttaaaatggaaggcatcgcttttatcgtcgcctcggccaattcagcttgcgcaagctccccattgggaagcaggcgtttatgggcattccactcattccagactgtgcggccgtccgggcgctgatccgtgagaagagtgaccgtgtatccgtcatacgcgatatatccgttttcttttaatagattcaggctttcttccagccatctgccgtatgtgccgatcacgccggcgctccgcatggatgctgcaggtgtagtgacaggctcgctgaaaaaaccgattgactgtaattggtaaaagagcagtttgcaaagaaggctgttcatatgcgcaactccatttctcgttttaaagtctcaagccgttcattccgatccggattttgccgcttgacgctttccataaatgaaggcttcgggccggatacaaccgatattgcatcttgatccgtcagcgcggctaagccgtgcggagcagctttgatgaatgccgcttggctgaacggttctgatagtaagacttccagcgcctccattgcttcatcgggttcaatagaaccgatccctgatgcctccatccgttttctgtaagacgggtctgatacaacacccagactgccccaatatccccaattcatgactttcacttcacaaacaagcaaggaagcgatatggcgggcaaaggcgtcttgaaatgtacaccctgccgcatagttgctttgcccggcattttttgtgaaagaattaacggatgagaaaaacagcacaaaatcaagcggttcttccttaaaagcttcgatcattcggacgctcgtattcaccttagctgaataagcgtttctgaaagaagcttcatccatattcgccatacttttgtcggcaagcgttatcgcggaatggatgactcccgttatattgccgtattgctctcttacggaacggacggccgctttaagcgctgcggcatcttgagcatcagcctgtatataatgcggcgcggggcctgatagcgccagcctgtctattttgctctgaatctcctgatccttcggccgcctgccgatccatatcatccgtgccttgtaacgggtgatcatgtatttgctccatgcttctccgatgccgcccgctccgccgatgacagcataaacgccgccttctctgtacgacatacgcggagcggaacttgtcagcacccggactgttttttgcttgtgccaagctccgttacggtacgcggcagcatttccgtccggatctggaggaaggcgccagatgtttttcatctcagacgaatcactgccttcttctgcatcaatcagcctgatgtcccagttcggatattcttttgccaatgaaccgatcaaaccgtgtacgcctgcatgctcaggctgcggcagatcacccggatacacggactgtgtctgccgggtcaccgccgtaaagctgatgtttcggtttccatacccgagtgacagcagcgctttgatgaaacggaaacattgaatcaccccattctcctgctcatcaagcatttcctgactgacggatgcgggtgcgaaacgatccggcgcaatccataagaaatggcggatatcctgatacccggctgtcaattcacgtaatgtttgctcgcttgaatgatccggcgtctccgccagatgggcgcggggccacatttttgccgcagcctttatggtatttcccggctttccgatgatcagcaattgttcctcaaccgctcgattttcttccagagaaaagaaagttttgtcccaaacaggggcaagcatcgccgtctgaacttcctgccgtttgctttcggtttggtttgtctgccggacagcccggcaggagaagcctgttaatctcatacaaacagcgccgttttcatcacataaatcaatatccagcgtcagcgctccgttatctgaccgatcgctctgtttgcggacaagcgcccacatcgttttctgagtcggctgaaatatttctgcctgccgcagggaaaacggcagcatcggagtgtctccggcagtatctgaaccggcacccagtgacgcctgaaacgcggcatctaaaagactcggatggatgacaaactgatcggcggtactgtctgccgattccggcagcgacagccgggctgcagcacccctctctccgatcatcagctgatcaattccttgatggctcggcccgtatatcatacccgcatgccggaaagcctgataaacctcatcagacgtcataaccgattggctgcagccggacagccagccctctaagtgaactgacggaaccgctgctatctctcctgataccgcggtgcctttactgtatataatccgttctcccccgggttcttccgataggctgtaaatcgtaaattcaatgtcttcatttcccttaaggataaggctgatatggacttctacatccgtccccttatgaacgacaggcctcatccatatgagatctttcaaatacattcctttacgtccgtccggcacagcgtatgcggcacgctcaacggccgccctggccatttcgatcacggcggctcccgggagcaccttctgtccattgactgtgtgatcagtgaaaaagaattcccgtccggtaaaaacagaggtgaatttcagctcccaaagatcggatgtgttttcatgaaggagcggatggatcaccgttttgccgccatccctttttgaaaccgcctctgcttcatcttgaatccagcatctgacctttgcaaacggataggcgggaagactgattctccggggtttttgtcccgaatataacaagttccagtccacatcgactccctgcacccacatgttcagcaaatgaccgtactttctctttttcagccatttaaccatggcttcctgcaaatcttcatcagattcaaacacagccactgtctcatgatttcgcttcgcccgccccctgtaaagatgcggtgcgttttcattttccaagtacgatctgagcttgtcctccagctccttaagggagtccgcaatgagagccagccgctcatccatcgcttcccgccccgcttgtaaagtgtatgcgacatcaaataagtccggcttatctatatgcttcttttgaagaaaagcaagaaggcgctccgcatattctgtcagacgctccccattttttgcagacagcagaatgacagccggctcttggccgctgattgcttgtttgacaggagcctcatattcttcaataatgatatgcgcgttagaaccgcccgcaccaaagctgctgatccccgccctgagcggctgttcttctccgtctgctgaaatccgtttccaatctgttaattcacggcagacggaaaacggcccttcatcaaattggatattcggatttaaaacatccgcatgcaaagatggggcgatttgtttgtgcttcatctgcagcagcacttttgtgacagcggcgatgcccgctgcagattccccatgtccgatatttgatttgacagacccgatgagacatgtttcaggaacatcaccgaatgcatcggttaaagcccggatttcaatcggatcgcctaatttcgtccctgtcccgtgcgcttccacatagctgatctggcccggagatacccccgcctcctgtaaagcttgagaaatgacttcgctttgcgccttggggttcggtacggtgtaaccgctcgctcttccgccgtgattaatggcagctcccttaatgacgccgtaaatccgatctccgtcttgtacggcgtcttctaaacgtttaagaagcagcaccccgaccccttctgccggaatatagccgtcacccccggcgccgaaactcccgcagtgtcctttagatgagatgaactgcccctggctcagcatgaagtacttgttaggatgaacggtgagattcactccgccggcaagcgccgcgcgaatccgatgatcccgcagatcccggcacgccatgtacaaggaagtcagcgaacccgaacacatcgtatcgaccgaaatgctcggcccttgaaaatcacaaaaataggagacacggttagaaatggatgaaatcccgccggggagcccgatatgccgtcctttcactctcgcttcagccgcgaatagcgggtattcctgatacatgacaccggcatacacacctacctgacggcccagttcaggtgatatcctcgtatatcccgcatcctccatggccatccacgcatgcattaaaaacagccgttcctgaggatcaaggtgttccgcttcacggggggaaatcttaaagaactcaggatcaaaatcggcgatcccgtcaatgaatccgccccatttgctgtagatcgctcccggcgccgtccggtcctcggaaaagtaatgttcccaattccagcggtctttcggaatttcggtaatacaatcctttccttgtttgagattttcccaaaacgcattgatatcatcggcctgcggatacttgccggaaattccgacaatggcaatatccagcgggtttcctttcgttttcggacggctttgattcccggacggggcaaaagacgcattttcaagccgatttggctgaagcacttctttcacagacgcgtttttcaattccgccagctgttccccggtatgactgaggactgcggcatcaaatgagagaaacccgtcttttttatgtttgattgtattcaccacataggcggtatcagacatgactggtccgtaaagcgtcagcctctcaatcatgagcgggacgtgaatccgctttttcagctgcaattcttcttcaccgagcgacatataacaagaattcaatataagagggtcaaatgcaaagtgacgcagatcgcctttttctttttttcctgataagtccagctgcaataaaaaggagctctcactcattttgtatcccgccgttaccgttttcagcatcgggcctatcgtgaagtcggcaaccgaatcgtacagacgggaaataacatccggcgctaccttttgtgcgtgcgccttcatttgttcaacgtcatatgatttttttacgggtgcctctatacctctgcttatttctccttcggcacacgtcttccggctttctttaccggagacagtgcagcttgcggtaaagcgttcggcactcttttctgccgcaaatgaaatgtcaatctgtgcggcctctcccggctccagcgtgacgggcccgcccgtaaagcggatatctttcagctcggcgggatacgtgccggaatgagacgctccggatgcttcaagcaccagacacggatacactacacccatcagtgccggtttgccgaaaaccagatgatcctgaaggaatgcttcatgttcatagaaagtaaatgtctgactgactgattgcgtttcagagaccggtgctgcatccgcgacaaggccggaagattcacctgttccttttgtttttatgtcttcaagcagttcggatatgctgctgcactcaaataaaagagtcggattcagccgcatttcaaacgcctcttcgatgtctttaataatggccagaagctgtgacgattcaaggcctaattcaaaaaacacggtgtgcgcatcatttcttgtgacaggacggcctacgtatgttgagaaaatgcggtataaggtttcctccatctgctgaacgccaggtatcagctgccggtctgtccgcacctttttggctgtcaggccgagcagtgaagcaatatgcgcaccgctgaggttgtaaaagtcaatatccattttcaccatttcagaaggcgtgccggattttttcgaaatcaccgcgtaacagcgctccgtaacggtttcagcggcaataaacgaatcataataaatcggtaaaaacaaaccggcgcctgcatctgtctgcaatacgccggaggccatggcggcaccgtccatcagcgcgggatgaaagagagcgccggggagattttcctggcatgaatcagactgccgaatatcaaggaaacattcctcttcatttgcatagatctctccctccggcttcatcagcccgtcatgcgacagtccgcggcttctcgcgtcttcgtaaaccgtatgcaaggagactgatggaagcgcaacttgttttttctcttccgcgtcaaggcgcttatctgatgagaaaaccccttcgtgcacctccgctgataagaaaaccgtcccggaatccgccccgcaaatcgaggcagtccagaactccttttctttactgaatatgacactcacatcaagccgctctgaccgtttcactgataaaggatgataaatggtcacccgtttcagacagatggaacggaatgaaagatcaaggctttgctttgccagctgatacagcatatcaatataggccagaccgggcatgacagattctccgtgaacaagatggtgtttcataatgggatgttctgccgtcaggcgcagattcactgtttttttcatggttcgtccccttttaaaaacgtcacgttgtcacctgccaaaacgagtctgcaggtgcagtgcttgtctctgcttttttctcatatttctttaaaagatccgcaatgtctgttttttcattacttgttttttccgcttcattctccgtgctgttccagccgcccaaaagcgggtagtgtttttttctgaattccggcggctgaggcgcccggtgatgttcccgctgcctttcacctctgtattcttcaacgaggatatgagcatttgtcccgccgtcaggaaatgaactctgagctgcgacgcggggtttcttctctgaatgccaatcaacgggttcacgattaaaatgaatacgcgacgcttcaaagtcataatgttcaaatggctcacgcgctgataagaaaggcggaatccgcttatgatagacgctcagcacacatcggatgaagcccgcaagacctgaagacagaagcaaatgccccacattcggtttcaccgatccgatccggcagggcagaagcgttttccggttcagctgatagacatctgagagcgccttgatttccaccgaatcaacgattggggaaccgcctccgttcacttctatatatccaatgtcttcgggcgacttttccgccatgtcaagcgcagtttgaatggcgtctctctgcgctcttatattcggtgaaccgggaccgagcgtccggccgtcattgtttaccgagacggcttttatgacgccgtaaatacggtctccgtcccgcaccgcatcgctcaatcgtttgataaaaaccgcccccgctccttctccgagcacttctcccgctgattcacggtcgaatatatgaaacacgccgttctcatttaaaatatggcgtgctccgaataaccggtgcgcggacggagataagagcagactcaccgaaccgactaaggccgcgtcaatccttccggccaaaagggcgtcttttgcaaaggacagcccgatcagccctgaggaacatgctgtatccacgacaaggctcggccctgtgacattcaaaaatcgtgaaatgttggccgccaaatagttttgtcccgcccccaaaatcgggttaggcgcctgcaggatatgttccataccggctgaaggctgcgccctgccgccgatgtacacgccgactttccggcccgataaatccttttggccgtacccggcatcataaacagaatgaaccgcttcttctaatatgatccgcgcctgcgggtccataattgccgcgtctttttcagagatgccgaaaaagcccgcatcaaacatgtcgatatcatcaatccaccccgcataatcctttgcatgtgctgttgcatgccagcgcgatgcgggaacaggccgaatggcggtgttccctttcatcagcagctcccaaaaagcatccgttccgcccgcccccggaaaacggcaggacatgccgacgacggcaatatcgtcttcggtatccgctttcggcttcatggatgttctctcttcagcggcggcggttaaatcaggctctacgtccctgtcttgaacgaaaccattttcttttgtcacaaaatcagcttcatgatgcgctgcgaaatagtcaaccatttctgtaatcgtttgatattgaagcattaaggacggtgttaactttatgctgatccgtttttgcaatgattgaaccaattccgcaaaaagtattgagtcaatcccgtattcatcaaacggcatatcatcttttatctgctcatccgtcattttcagttcttcgctgaaaacggtgcgcacccattgacgaatcatatccttcaccttttggtcaccggcagtgctttttttcatgggagcttcagctttcttcaccttcagaagatcaccaaaatcaggctcactgtcttcgggaacacaaggaattccgcagctttgtccgtttaaaatgatgtaatctaaaaacttcagtccgtcttcggcagacagcctggaaagtcctgatttttgataagcaggtgtttccggcaggccttcagccatgccggtttctttccagacgggccattgaacggctttaacaaacacgtttcctttacctgcttgatgatttgcaaaagagtccataaatgaattagccatcgcgtagtcactttgccccgcagcaagcgaagggatcaggcccgaaacggatgagaacaaaataaaaaacgacagcggctcattctgaacggcttcatagagaccgcgaagccctgttactttcggctcacaaacgctttctatttcagtttcggttttgttataaaaagcggggtgttctcccattgcgcccgcgcaatgaaaaacgccggtaatcggccccatcgtgccgcggatgccgtccgtcatgttccggagccccttttgatccgtaagagaaacgctgtaataacggatctccgcgccccgctcggctaacctctgcatccgctcggctttttccgggagaatgccgtcctttttcatgtctgcccactctgaggaatcgggaagcggctcccgccccatgatgaccagtttcctgcagccgcgtgaaacggcatgctccgccgcaattgcgccgattccgcgcgatccgcccgttattaacagcacatcatcagacgaataggaaagctcaggcgccgccgaaacattcataccctgcttcagaaacggcacataacggcgattcagcctgtagcagcattcactgacgcttttggcccgcggctgtaaaaactcaatctcaatctgtctgcttaattcttctgtatgctcaatctcacaatcgctatctatcgtaaaagaatgaatgttggcatactcagcgcccagcatccggtacagccccgccgttttcgccccttgcatcagaggtttactttccttgaaaggctggaggcggtgtgtcacttggctgaacacagcgccgctatgacggagtgattccagagcctgctgtaaaaaggcaagctttccgtgttctatctcttcctgccgttcatattccgcgtcatatgcggttatgtcgacgaccccgagtatctgtttgttttgaagagactcccgcactctgccgtaaaggtttcgccccgatgcggcggcataataatcggcgccgtcttttgcctgatggatgaagcagatcgtttcaatatggccgtttcctttaaaaagagcatcggccaatcggctcgtcttatcagttgcaagtatcattactgttcctgataatgcttcagattccgccggatcttgctgcttccagtctttttgaagaatgatcttttggttttccgccggttcgtctgtctgtttccggatatccgcaggcacaggcacccaataccgctccttcgcgaacggatatacaggaaggctgacccgtttcggcttctctccttcgtataacaggctccagtcaacggcggctccttttgcccactcagtgagcaatctggaatattgcttgtttttcagcagctcggccattccacttgatgaaatatcatcttgagcacgtccgcggaaacatccttcaatttctgttttccgttcaagcacatccttcagcttcgcttgcaggccgcaaacggatgtaacgataaatgccagccgttcaggcatcgcttctctgccagcttgaagcgtgtaggccaggtctttaaggttgacttctttttcccgtaaaaagcggtcataccgtttgacatattctaataggcgttcttcattttttgccgaaagcagaaacagaaccggctcgtcttcccgtatatttaccgatttcttttcagcctgcggcggcagatattcttctatgacaaaatgggcattgctcccgctggcgccaaaagaacttaaacccgctcttctcggctggtcaggatgtgacggccgttgccattcttccagccggtccgccacataaaacggcgtgtccgaaaacggaatatggggattcagcgtgtccgcatgcaatgacggaaagatttctccatgcttcagctgcaaaagcacctttgttaatccggcgattccggctgctccttctaaatggccgatatttgatttggcagagccgatggcgcaaaaccgcttcttgtttgtccatttgcggaaagcgcggctcagcccttcaatttcaatcggatcacccagagacgtgcctgttccgtgggcttcaatatagctcagtgtctccggatcaatgccggcaccctgaaaagaatctgtaatgacttccgcctgtgatgccggatcaggcacggtcaaaccggatgtttttccgacatggtttaaagcggagccttttatgacgccatatatcggacagcccattctttccgcttcttgaacagttgtcagtaacaccgcgccgacgccttctcccggcacataaccgtcaccgccgtcggcgaagcttttgcagacgccttctgaagacagaaatccggcattcgccaaaaacgcatatttatgcgggtgtgtgaccgcattcacaccgccggcaatggcgaattcgcactccccccttttaatgctttcacatgccaaatgtatggatgtgagcgaagaagagcacatcgtatccacagccattgacggtcccgtaaagttcaggcagtgagacacgatattcggaacagaggcaggcgtcacgcccatagacagcggtgtgccccgctgtgtgatttcagccccgaacagctcataatggctccaaaacacacctgcgaataccccgacgcgttttctcttttgcgaagatggcccgcgcgccgttctgtcctgataaaaaccggcatcttcacaagcttcccaagccgtctctaaaaacagccgcgcctgcgggtccatcatttcagcctggcgaggagtcagattgaaaaacagcggatcaaagctgtctatgcgatctaaaaatcctccgtaacggtagaactgatctgcttcatatgagaaaggataacctttccatctgtctttcggcattgttgtgatgcagtctttccccgagcgcagattttggtaaaattcatcaatgcttcccgcctgcgggtattttcccgccaatccgattaccgcaatatcgcgctcttctgtatgtctctcttgttttcggctccttctctttacagctgcatgggataatgaagagcggttcttgtctgccatcggaaccaatcgggccatgctttcagttacagcgggctccttcccgtataaaataacggattgcagcttgccgagacgcagcatatattcaagtgcagccatcccttccccggccggaagcgggctggtgccagttgcatcattcatgatctctttcatcaagctgtcaacctgcatgccgccatcttcccaaagcggccagttgatcgtcatagaagccccggtccgttcgcctttttccgctctgcaatcgcgatatttcatatattcatccataaaagcgttcgctgcggcataatctatttggcccgcatttccggccaacgccgagaatgaggaaaatacggcgaaaaactcaagcggttcattccgtgaagcttcgtccgcatgaatcaggccgctgattttcggcaggaacacccccttcaagtcagaactgtctttttggatgataaattgatcttttaaaacaccggcgcaatgaaaaatgcccgtcagccggccgaaggtttctgtaatctgagcaaatgcccgctctgtttcggctttgctgccgatgtccgcttgaacgtaaagaatttctgcgcccaatgctttcagtctgctgatcttctcagactgttccggcgaacggccgatgagtgcgagcttcactttttctttttctgcaaggtgacgggcaagcagaaatccaagaccgccgaggcctcctgtaataacatatacgccgttttgtttccaaggagactgtgtctgcccgtccagtttctcaatacgttcgaacaatctgatctgccgcatattgtctttataccgaatgtctgtacatcctgcatgagagcagtctgcttctgttctaatgattgcggccgtctcacttggcaatttctcattcttttcatagaaggtgatgacctgaatgcgaagagccggattttccagatgtgccgttttcagcatagccccgagagcggaagacaatgccgctccattctcaacggcgcatacaagctgaatcaatgtatgttctttcggatggtctgtcagttcccgtttgagcatacgaaatatgcgctcggcatctgctccaaactgctcatctgcagcctcatgctcccttttcagttctatcacttccgcttccgggcaatgtatgacgagttcacctgtgagacggggttctgcatcggcagcgataatgagatgacgggtgtgtttttgcccgttctgcaccgccgttcccagcggatgatctttccaggcgggttcaaaaaacagaacttcatcagcaatgtcagcgtctgatgtatgccgttcttttgccgaacctttcagcacacagcccgcttcattgataaggtaatccgcaaggcggcggacagatgaatattcaaaaagcagtgtcggataaaactgctgctgaaaagtctgctctaatatctttacaagcttcagcaaatgcgccgagtcaagccccatatcataaaagcctttcctcacatcaatatcctgtgccggacgattgaccagcctggcgatttccgactttatgtaagtcaccatgttttgttccggcgtttgctgttcagacacgtcttctgcggccacagaattttccgactcaccacggccgcttctgttctgctgaggcggcttctctttgtctatcagatgggtaatcatattcgcttgtctgaccctttttactgtcagtttctcacattcggccaatacgttccctgccctgtcgtaaatcgtgaagtcggccgaataaacatcaggttcgctatctgatacgccgctttcagtgcggctgtttttcgcagaataagtgtaaatcgttttcggaaacggctgatacatgcaaaaacgattgatcataaaaggaatataaggtgtgtcattctgcttttgggccgacaatgcaaaggaagagccggcaagggtggacgcatccaaaaaagccggatgcgccttaaatttctcccggaatccttcagccaaatcactcagagtaagctccattaattcttctttatcctgaagctgataaacggccccttcatttttcataaactcgccatgctcaatatggcttcttcttgcaattccataaatgtcatgcatgtcccattttcggcttgcgtttttcatgaacgcttcaatattcagttcttttgcccgcggcgtgtcttcttgcaaataaagctggcattccatattctcatcccggtttccgccaagcggtgtgccgttttttgctttttcgctagtaatctcaactttccagctgtcacacgccggcgtaaaggtcacatacaggtgtttatcaaactcttcagatgttacaacaggctgcttaaaaataatctgtcttaattctataggccgttcaccgagatacccggcggcgagccgatacagcatatctattaaagtcacgcccgggaggacgcggatttgatgaacgcgatgatcccggacgatataattcgtatggctgattttctgcaggaacgttttgacttgatcggtggcaactgccaatctatcacacctcgcttatttcaaacattgcttctgtgcccgcctcattttcttccgcttcggacaactgtgctttttcaggccaataccgttgttttcggtatactgtctggccgcctttcggttccatggccgcttttcgctctttcggaattccttcgttgctgacaatgatatgggcgttattcccgcccaaaccgaacgcgctgaccccggccctgagtatctctttttttccgttccaccgcttcagctcaagcacaggataaagcggagaatctttaaattggaagcgggggttcggtttatggcaatgcaaagtcggcggcagttcttcattggcaatcgccagcaaaactttgatgattcccgccgcacccgccgcactcagcaagtggccgatattgcttttgacgcttcctacaccgcaaaattgtttttcatcggaataagcagacaagacattggttaatccctttaattcaatcgggtcgccgatcaatgtaccggttccgtgcgtctctacgtatgtcatggtgtccggatcgatttccgctgattgaaccgcctgctcaatcaagtcctgctgcgcccggggattcggcgtcgtcacgcccattgtgctgccgtcattatttatcgcagagccgtcaataacgccgtatattttatcttcgtcttctatcgctttttcgagcggcttcagcatcagcacaccgcagccctctccgattcctgttccgtccgcaccggcatcgaaagattttgaacggccatttggcgataagattctcgccgcgctcattgtgagaaaaggtttttcatcaagcaaaatgtcaaccccgcccgcaaaggccgcttccgcttctccattttgaatagcctgcacggccaaatgaattgccgtaagcgaactggaacaggccgtatccacgaccaggttgggccctgtaaagttataaatgtgcgccatgtgtgcggtaataaaattttgccccgcgccaataatcgcgtctttttgcaaatattgaaatttctgatgaaatgcacctgcccttgcaccggcaaaaacgccgatacggcggccccatagatcctctttttgataaccggcatcggctaaagcttccgcgctcacttcgagccactgcctttgcagcgggtctatcatcggtgccagcgtttccgaaatattgaaatactccgggtcaaattgatcaatatcgtgaataaaaccgccccatttactgatgctttttccttcttgatattcaccgggctgatagtgttccccggtgttccatctgtccggcggaactccagtaacggcatccgttccgctgcggagattcttccaaaattcttttatatcccccgctttcgggaaatgacaggccatgccgatgatcgcaacctttccccgtttcccgggcttatctgccgtttttttgctccgtttcggcgtcttctgcaaagggaccttctccgcggaaactgctgcatctgccgaaaaagcttccggacaatgtgcggctaaataatccgcgagttgttcaatggtaggatgctccagaaggacagtcggatcaattgaaacggacggcagtttttgatcaatctttgtcagcacttgcgccagaaagatagaatccattccgtattcctgaaaaggcacatcgatatccatatgcgtttcatcgatactcagctcttttgccaaaagcgacctcagccaagattgaatatcaatccggttatgttcccgtttttttgtttcagggggtttggaagctgctttcattcctttattggcggctggcttggcgtttttcagcgctttgatgtcccaatcatgtttcacttgtgccggcagcacgacagctccgggtctttttcttaaaatgtaatcaagcatcttgagaccttccgcgtcagaatgcctcagcaatcccgtttgctcataaatcccgctttttatatccctgctcatgcccgtctcatcccatgccggccattgtatgctaatgatgccgctctcattgttttctgcaaaatagtccatataagaattagccatcgcataatcgctctgacccgccgcaagaatcgggacggatgccgagacagatgaaaacagaacgaaaaatgccggcgtatcatcctttacactctcatacagactgtgaaggccgtctgctttcggcgcgagcacccgcgcaatactgtctttggatttacggagaaaagcagggttttcacggtccgcaattcccgcgcaatgcagaatgcctccgacaggtccgagcgttgaggttacctcttttataagccgtccgacggcctgcttatccgtcagatcaactgctgagacgcacacttttacgccttgtgattccagctgccggataagctgtattttttccgaaacgacagggtctgtttgctcaagatcccactcggttttcggcggcagctcctttctgcctgtcagaagcagtttcttcacaccgtatgcggaaacgaaatgcttggcgcataaagcgccgagtccgcgcgttcctccggttatcatcaggacggcgtcatttggaaacgcagtccggtctgtttgcacggcttctggttcaatctgatcagtctgccgaagaacatagctgaagcgcttgccgtccctgcagcaaacagcagactccgttaagtctgattcaatttcttgtttaataaaagcggctgtctgctccagcggcccttcaggatcaatatcggcgtgacaggtgagaatatggctgtattcatgccgcagcatgcgataaagccccgctttttcaataccatgcataacggcagccttatttttgaaggcttcaagcccttttgtaagataaagcattttcatgttttcttgtccgcggccgtattcaatcagctgctgcagcgatgccacccagctgatgtcctgccgcttttgtcgggagccgcagccggtgaagtcaataaacccggaatagatggccgcgttcggaccctgtaagaaagagatgagctgattttcctgcacaatgtcagcatcattcagctgttttttcacctcggcggcaaggtcttttgtatcttcagagacgatgagcgctattttgttgttgaacggctcggatgaagacactgcctcgcacggttcccatgttttctgcaataatactgttttttgattcgaaagcggcagctgctcccgtttcggcacccaatagcggtcggctctgaacggataggagggcaggctgatgcggcgcggcttactgtccgtatacagctgctcccaatctgtgtcaaatccgtttgcccagagccgcagcactttcctgtatttctttttctcaagccaggcgctgacgaggtcagcaacgtctttatcgtctgagaacatggagatcgtgttattctcgcgttttttacggccgctgatgatatcttcgctgttttttcccatcagaaacgcgttcagtttttcagtcagttcctctgcggagcctgcaatgattcccagcctcgcttccatcgcatcccgtccggtctgcagtgtgtatgcggcatctgcaagatcgatatcgcgggatgatccgttttggataaaatcgcgaaggagacgcgctctttctttcagccgctcttcatttttagccgacaaaacaaaaagagatgacgctttctcacgggtttcctgctgttccgtctcacttctgcccatgtattcttcaataacgatatgcgcattgacacctccgaaaccgaatgagcttacacccgcccggcggggcaggacccggccgttttcatcacgcagcgcttcccactcctttgtttctgtcacaatgtaaaacgggctgtccttcaatttgatatggggattgatgttctcgcaatgcagacttttggcgagcgtccgatgtttcagctgcatcaatactttgataacgcccgcaatacctgctgcgagctccaaatgtccgatatttgtcttcactgagcctatcccgcaatatccgcccggcgccccgtctgtttggaaagcttttttcaatgcattgatctcaatcggatctccgagtgccgttccggttccgtgcgcttctatataagtgatggttgacgggtgaataccggctttttgataagcgcttttcagcacatccgtctgagcctgcggattcggcgcggtaagtgacgctgagcgtccgccgtgattttccgctgtaccgcggatgaggccgtagatgtgatccctgtcacgctcagcctctgaaagctttttcaagacaatcatgccggcaccctctcctctgacataaccgtcagcctgatcggaaaatgttttgcagcgcccgtcttcactgagcatgcctgctttttgaaaaccgatatgcccttcaggcgtgacgatcgtgttgacgccccctgcgaccgccatatcacaatctcccgtttcaatggcttttaccgcgcggtgaatggcgactaaagagcttgaacaagcggtttctaccggctcgctcggcccgtggatatcaagaaaataactcatccggttcggcccgacggacggcacgattccggtcatcgtatacccctcgacaggaagacccgccttattgattaaagtttgatatccgcttcccagtgtgccggtgaaaatgccggtttttgttccggcaatccgttttactgagtaccccgcgtcttcaatggctttccacacatacatcattaatagacgctgctgaggatccatcattccagcttctttcggagatatcccgaaaaacagcgggtcaaacccggcgattccatctatgaaaccgccccatttaattgacgttttatttgcatccgctgccggatcgccgtaatattcgcgccaatcccagcgatctcgtggaatttctgtgatgcaatgctctcctttttgtaaacgtgtccagaattcatctatgtctttcgcttgcggaaaaataccgctgattccgataatggctatcggttcggttttttcttctgattttccttttacggatacgggcgtttcccgcttgacatgaacggccgccggagcttcagcttttcttattccggcttttggagcggtttttaaactctctctttctaagccgctgaatgcttctttccattcagatatcaaatggccgctcagtttgcgcaatgtcggaaattcaaagaagatagtcgggctgagctcaagctgataagaccgatttaatagatttgtaaattcagtgaaaatgatcgaatcaaatccgtattccgtcagttcgctgtcagcctcgatatctttcatgcttacctttaaaagatctgatacatgccgctttagtttctcttgaacctgatctttcagatctcttgcatctgccactgccggagcttgtccggcggcgctttgttcttcgcccagatcgaaaatatggctgcgaatccgtttttcgtcgccttctgccaccatgacctggtgttctccggaggcaaaagcggcgtacagcgcttggatgcctgaggccgatcgcatggctttcattccggtctgttcgtacatcagccgttcggtctctttgtccacgcgcataccgccttcttcccaaagcggccagttgacagacagagtctgcccgctccgcttgttgtcccgcacgagacggttccggcgggctgcataaacatccataaatgcgttggctgccgcataaccggcctgccccggatttcccatgcctcccgccaaggaagaaaacaggatgaaaaagtccagccgcgcatctttcgctgcttcatcaagattgataagccctttcactttcggcgccatgacggtcttccgttcgttttctgtctggttcagaatgtaattgtcagcgatcacgccggcgccgtgaatgatcccgtcgagtgttccgtgctcctcctgtatgccgcggacgagggcgatgaccgccgccctgtctgtcacgtctaccggttgatacaatacgcgggcacccgacgcttccaagcgccgtaagcgggcggagcggtctttatcaagcgcttccgcccttcccgttaatacgaggacagcgtttttgacgcgggaggctatttcttcagcgaaaatcaggccgatgccgcccgctcccccggtgaggaggtagaccccttcgtctttccaaggaacggcgcccttttgaggcgccggcagaggacgccagtttctgacgagacgtttgccgtcttcataacggatttccgcttgttcaggatgcgcccggttttctttcagcttggcaagaagcgccgaggctgactcgtccggatcggcttggatgacttggccgtacagcttcggatgttcaaggtgagccgttttcagaaaagcggccagccccgccaatacattgtcttcccccctgtcggggacaagaagctggatcagcgtttttttcttctgtttttctttgataagacgcgtgacgatcgctgacagctccgccgcgcaggcatcataacggtcttcaatcggaccttcgccgtcagccgcacatacggcgccgcttatgtcctcagcgttcattccgccatacagcgtcacgtatctgaaagactcttcttgtccgccgccttcatccggcggtgattcctgccactttggctgaagcaagagcggtttttcctccgtttcctcttccagaaaacgggcggtgagccccgtcaatcggacacataccgcgccgttttcatcacacagctcaatatgataggcgccgtccgctgaggaaagcaccgcccacatcgtctcccggcacgcagaaaacacctgcatatcctggagggcaaacggcagaaacggccgtccggacgcggaaccgtctgagagcacgagaccgatagaagcctgaagggcggcgtccagcatgctcggatgcaggatgaacggctccttttcctcgcgggcggacggcggaagagtgagctttgcgagcacttctccgcttccggcatagacggcgtcaagcgcctgatgcgacggtccgtaggtgatgccgaggctgtcgaacgcttcatagcactcagcctttgacaagtgacggccgctgcagcgcgcctgaaccgcttccacatcgagtaccggagcacgctccgtctcttcgagcacggcctttccctggaaaaagacaagcggctcttctccttcggcatacacttcaaaagcgatgtctccgttttcttccggctgaagctttacatgaagcgtcactccttcagaaagcgccgtcaccggacggagccaaacgatctgtttgagccttacacccgctttcccgccgggcaagtcttcagcagccagcgtaacggcggcccgggccatttctaaagcagccgcgcccggaagcaccggttttccattgacgatgtgatcggcaaaaaacggttcatgccctgaaaaaacagaagtaaagcgctgggcggtaaaggtcgatgtattcgcgtggagcagcgggtgaagcttttcacgttcgtctgaattccggctttcaagctctccctgaagacgatcggacgcccaatatgtatgcctggcaaacgggtagcccggcagattgccgattcgcggcaaaggtccgccataaagcaagtccccttcgatttcataaccttgacaataaaaatctgccagcacgcataacagctcctgatattttctatggtcagaatatgaggcgctgcacttgccgagcacttctattatgtgctcctgaatatgctgacgccctgcaaaatgctgcggtacttttcccgaaaacacataaggatgatgttcattaagctttgcctgcttccatacatacactgcgtcatcagcatcttgcaccacgatggcggcgcgatggttaaagtgatgccttccttttaacaacgtatagctgagctgggccagatcattttctttcagtccgccattttccgcccaagtgatcatatcttcgattttttcctgaagggcctcctctgtttttgcagacaaagtaagtaaatatgcaggggcatcacgatgaggtgaaacgctgcgcttatagctttccataacgacatgggcgtttgttccgctcatcccgaatgcgctgactgcccccattcggtttttacccggcagagaaggccacggtttacccgttttattcacataaaaaggactcttctcccagttgatatagcggttttccccgctgcaatgcagactggcgggaatcatttcacgggagaacgcctgtaaaagactgatcaaactgacaatgcctgacgcggcaaacgtgtggccgatattggttttaattgatgtgagcgcgcaaaaagcttcttcgtttgtataggcagaaaatgcgtcataaagcgcgttaatttccaccggatcaccgagttttgtacctgtgccgtgtgtgacgatatattcgatatcttcagggttgatacggccccggtcataaacggaagtaagcagccgggtctgcgcgacgccgctcggagcggtaattccgtttgttttcccatcataattgatgccgctcgcccgaatcaccccgtaaatcggatcaccatctttttccgcctctctcagcggcttcagaacaaccgccgcggccgcttcccccggaaccatgccgtcagcccttttatcaaacgcgaagcatttcccgttttccgacagcattccggctttatctatcgtttcaaaaaagtccggggtattcatgatattcaccccggccgcaacagctgttgtgcactctttattctgcaggcttaataccgcctgatggacagaaacgagccccgaagaacatgctgtatttatcgccatcacaggaccggataaattcaagtgataagccagccgcgccgccaaaataccgttatgatgagacgtgacattgcctttgtcccgtgttaaaaggtgataatctccttcttccgcccccacaaacataccgatcgtctgctgcttgatgtgactggcgccgtagccggcgtcctcaagggccctccacgcttcctgaagaagcagccgctgtttcggatccatcgtttcagcttccctcggcgatatttcaaaaaataaagggtcgaattcgtccgcccccggtacagcgccgagtttccactttgaacttgtgaagcctttttttgcgaccggtgcgacaacgtccttttcctgaaacagaatatcccacagctcgtccgccgtgcgcgcctgaggaaatcggccgctcatgccgataatggcaatggaatcagctgcctgactgccctcggttccggcgttcagcttatttcttcccctctgcttctttcgcttttccgttcctgccttttcaaagacagattgatctgcggattcaggtttcttttcttcatagacatgccccatgacggactggtgttccgtcagaaaatagcggacgaccttctccagtgtagaatgtccgaaaaacagggccggtgtcacttcaattccgtaatgggcggacaaagaagaggcgaattccgccaaactgatagaatcaaagccgaaatcagccagattgtcagcgtccgtcagtctgttcttgtctattttcaaaagccccgccgccagttctttcacatcccagcttacgcattcttccagtgtaaagcctttcatttcactccgccttcctgaaaacgggacgttcctgtttacagaacccgaaatcggccgttcgccttgatctatctgcaggaagcgtttggccctcgacggaaaaccggccaggacgagatactggctggacggctggactaacaatgtttcaaaagcttcgagtccttcctcagtgtataaataacgctgtccgcttgattttaaatacatatcggtgctttccgccgtgccgacatgcatccccccttctttccaaagcggccaattgattgcaagtgacttgccgcttctgagtccgaggctcacaagtttatcccggtgacggacaaaagccatttggaagcggttccccatcgcgtagtcacaagaaccgaagtctcctaaaatcgctgaagaagaagagaaacaacagaagaagtcaagcggctcccgtgacagaacctgatctaacaccgcggtgccgtccgcttttggcgataagacttgctgaaaggtttgcagatctttctccagaatgctttcagtgccttgaagacctgcagcgtgaatgacaccgtgaatcggcccgcatcctttctctttcacttcttgcaaacctttctccatctgggcctgatctgcggcatccgcctgcacgtaaaacaccttggcgcctgattcttccaatctctttatcttgttcagcaccgggccggctgccgctgatctccccgtcaaaatgagcgtaaccggtcctttttcagcgaaatatccggcaaataacaagcctaattccccgcatccgccggtaatcaagtacgttttccctctttttatcacacgcttctcaacaggggcgatatccgtctgcttcatttccatgacgtggcgaatttccccactgtacatgacactgccgaacgactcgctgtgaagttcttcacatacgttatagatcagtttttctaacggtcctttttgttcaaaataaaccgcggccgtatccgtctccggcaagatcagtttcagcgaccgttccagcccgatccatgactcagcgtaactgatatcggtatcggtcccgcactgagcggaaagaaggattcgcctcggtttagaacgcaaagaagcagctgcgcggatcacatgatacagaatggaatagtctttcacagccttttcatcttcaagcggccatccatataaaacggcatccgctttgcctgcagccgtttcaatatgccgaaacgtttcttgatatgcttgtccgtcagtggttttaatttgataatgcgtgtttgaaagcttttgagtttcctcaccctgtgaaataaaaaacacgccggctcccggataaagggattgtaaagactgataagcatgctttctggcagcttctcccgtaagaaaacagatgaccgttttcagctcttcatgaatggatttcttcagaggttgctgcgtccacatttcttcaaatatcaacatctcggattgttcctcttgcccgtgatcctgctgagacggctgtctcattcttatccctttgatttctgcgcagacagtgccggtttcgtcacaaaattgaatgtcacagccggtttgattctttttattaatatacatccacatgccggatgagcacggacgcatgacgcgcagttcttcaaccgcttcaggcacgatatggactgacggctccgtttttgccaggacatgaaaagctgcgtccagaaattccggcggcagatgatatcccggattacagccgctttcatctgtgagagcaagcttcgcccaaaccgcactttctcccgcataaagcttttcaacggtgcggaactccttactgatcgttacacctgatgtgcctggtgtttcataatcgaatgacagcgggcggcagtctttttgtaaggaggcaatatcaagcacgcgggatggctgtatgttcccttgtccgatgattccataatgatgcagcttctcttcgtcactgtatatttcataatggatgccttcctcgtcttcagacagaagggagagattgacgcccgcaccgtgatgtccgccggtaatcgggtcagtccatgccgccgttcggatccatatctctttttcttcagagctgtctgccgcatgatgaaaagccgcaagcgccatttctaaataaacggctgccgacagaacccgctccccgctcacatcctggaaaacgtgttcccggcctgtaaaagatgtatgatagctttgctccgccaaggttgacgtattttcatgcaggaaaggatgcacatattcagttgttcctgtttgtggttcttcccgcttcatccagtagctttcttttgcaaatggataagacggcagactgatacgatgcggcagcgcgcctttatataaagatgcccaatcgacgggcgtcccgtgaacccaggcattcaaaagactgtcaaattgacgtttttccatccaatcactgatagtgccttccgtctccgtgacagcactatcactccggcccgtaaacaccccgcttacggaaccagcattattcagaaaagcaatcagcttctgttccaattcagaaacagagtccgctgtcatcgccagccgttcttccatcgggaccctgccgacttgaagggtaaatgccgcgtcaagcagattcgcatctgtaattgttccgtgtccggcggcatccgacagcaacagagcccgctcgcgcaagcggtctttatcttttgccgataaaacaaaaagcgccggacggccggtgtctgccgaagtcatttcagccggttcatactcttctatcagcaggtgggcatttgcaccgcccgctccgaaagaagatgtacccgcgattctcggatattctcgtgttactccttcagattctatgaccggccgtctccattccgctgtttcctgctgcacgataaaaggagaagtttcaaaatcaatttccgggttcagctgctttgaatgcagcgacggcaccagatatccgtgtttcatctgaagaagaattttggtgaccgcagcaatgcccgccgcactttccaggtgtccgatattggatttaacagaaccgatggaacaaaattgctttgcatccgtatagcggcggaaagtcttggttaaccctgcgatttcaatcggatctcccaaggaagtgccggtgccgtgggcttccagatagctgattgctctcgggtcaatccctgcccgctccatcgcgtctgcgatcacttctccttgtgctttcggattcggaacggtgaacccgttcgttttgccgccggcgttcagagcgcttcctttaatgacaccgtatatatgatcatgatcttcaacagcctttttcaacggctttaacacgatacagccgacgccctctccgtcaacaaacccgtcagccttatcaccgaacgctttgcacgcgtttgacggtgacagcattctcatagaagaaagtccgatataatgaaccggatctgtaatcaggtttacgccgccggcaatcgcgcattcagatgcacctgttctgatgctttctgcggcgagatgaatggcggttaaggatgaggagcatgcggtatcgaccgcgatgctcggaccgtgaaaatcaaacacataggatacgcggttcgggataaagtggtagtgggcccctgtcggatagttgccgttcataacacccgcaaagacaccaacctttttaccggcgcatagtgaatcaggggtatatccggcatcctccagggccgcataagcggtttccagaaacagtctctcctgcgggtccatgcgctccgcttctttcggggagattttaaaaaacagcggatcaaatttatcaatatctgttaaaaagccgccccactttgtatacatccggccttccttaccttttgtctcatcatagtagtcccgccaatcccagcggtctttcggaatttcggtgattccgtgttcaccggtctttaaccgttcccagaactcattaacattttcagccccgggataccgtccggcaagaccgacaattgccacttcaaggtgttttgacggcggttcggaagcgggcggcgctttttcagaaaaagatgccgcttggcgcttcgtcaatccggcgctttttttacggctttgctttttctgtaaagtgtgcggcgccttttcggcttctttatttgtcttgaaaatcccagccatatcttcctgtcttgagctgacgagatattccgctaatccgccgattgtcggatactcgaagaacaatgtgctgctgatatcaggtatgtcttcccgcacgcggttggtcagctgtacgattaagatggaatcgattccgtattcttcaaggggcgtatgggcttgaacgtcctcaatcggcatctttaagatggcgctgacgatctgtttcaaatactctgtgcttttttcaagcaaagagccggatgatgccgcttcagtatgacggacttcttcagaaaatcgcgcatgcagttcgcgctccttcgtttcagccaagaatgcggcaagctcttctatcgtccggtattcaaaaaacagcgtgctgctgatatcagggacgagatcccgcagctcattcgtcagctgaacgatcagaatagagtcaatgccgtattcatccagaggagccagcggatttatctcttctgccggcatttttaatacttttgccgcagcccttatcagaaaagccgctgtcttttccgaaagcccctctcccgcttgtttgatggggagctgacgatcagaggatgtttgcggtacgtttgattggcgcttttgcgcggtgtaagcttccctgctctgcctgatgactccgttgcttttcgccgtgataatctgctgggtgtgcagacgttcgttttcagccggaaattgaatggaatgaaaaccttcagccattaaaacggatttccatgtttccggataaagaccggggcaccccggaatccgcagcgcctcgtcttcgtacagccaccagccctctaataagccgaatgtaacatgtgtaaacggcgtatgcccgcccagttcattaacaagcagcaaaccgtcctttttcaatacggcttttgccgtccgtaaggttttccggatatttttggtggcatgcagcacgtttgcggcaatagcgatatcgtaggttcgcagatgtaatccctggcccgccgcaggctgctccacattaaacagctgatacgtcaaatacggattgtccgcgccgtattccttttcggcatacattaaaaaagcttttgacaagtcggtataacagtattcctgaatatggttttgataggggcggagctttttaaacagtgtgctgctcgttccgccggtgcccgctccgatctccagcagacggatgtttgcctcaggattgtttttcattacattttccacatacatacacgcttcatttgccagcacatcgttgtaataatcagcgagaatattatgcttatagattccttcaacaagctccattgaggaatcgggaaacatcacgtcagtggcttttattttgcctgttaaaatgtcaggcaaagcttgaatgacggtatccgccagcagaacctgcgctttcatatccggatctttcagccattcgtttttcttcttatgccactcttcccaaaccgcggccgtttcaccgcttttaaaatctctgtctaaaagacggatgctttcttccagccagcgttcatataaaggcagacaggaagccgccggcgcttcgccggtcagacccattgaacgcagcgtcacccgcagcacttgcagcaaaagccgattcaattctttcatttgattgcttatttctgttcttaaggataactgtgtacggtctttttgtttgtctcccttacccaaaaccttatcctcctaagaaaattaaatttgctccgtcattttgacaggcaatcagatagtcacaaattcatgagggttcattccctcgatcggaatcggcttggtcagcttcatcagccccatgcgggagatcggctgcgtcagcagagtttccagcgcctgcatcccttccgcccggctgatcagcccgagaccgattgcactcagtctgtcaaactcttcagaaatgtgattgtcagcccgctcccaataaccccagttcatcactttgacccggcatgacagccgtccggaaagctcatgggcaaatgcgtctttaaatgcgcatcccgccgcataatggctttgattcggattcttaatatatgaaataaccgaagagaaaaagagaataaagtccaaagactctttcgcaaatacttcggcaatgttgacggaaatatccactttcgccgcaaggccggcgtgaaactgtgattcttccatatcttttacgctttcattcgcaaataccatcgctgaatgaacgacgccgctgatggtgccgtatgtgtttttaatctgttcataggcgcgctgaagcgatggaagatcagaagcatctgcggctatatattcgggagccgggcctgatggccggtaccggtctattttttggcgtatccggctgtccagcggccgcctccctatccagacgactcgggctttatacgtcgtcaccatataatctgtccaaacctcgccgatgcctcccgcaccgccgatgatgacatatacgcctccatagcggtaaggaacactctcagacggcccgctttggaccggaagcaattgaggccggtaccattcctgatgtctgcgcacccatgctttacccgtacggtcgcggggcaggctgaatatgtcttctgcggggaaatcccccccgtcttcaagatcggccagacggatgtgccagctcggatgttctttagcgagagacccgacaaaaccgtgcacactggaatgagcgggatgcacctcatcatattgggtgataggctgtgcttggtgcgtaatcaccgtcatccctagctgctcttttccatacccgagaccgataagagctttggccgctctgaaaatttgcagcaccccgcttttttgatcatggctgtgagaatcagccggctgaggggcaaaccagatcatatgctgaatctcaccgagacggcggagccgatcagatatcacttcaacggaagcactttggccgatatcaaatctcacagctttaggaaacaatcgtaaaaccgcgtccgcctgcccgtctgtaccgcctatgatgacagcttttgcttcagaaatggggaagccggtttggttgtctatcggttccgcgtcccatacctgcatcagtttgacggctccggtaaggttacccgggagatcgtattgcttattatcggttacggccggcgcactttcggccatccgggcagaaaatccttttatccttacacacacattgccgcgctcatcacatatatcaatgtccattcttcgtacggccggtgtttcatgcgtcacaaatacggccgcccacatgtttggactgcacggatgaaaaacggtcagttcatgcaattcaaaaggcattaacggctgctccggataacccgcttgatcttcattcataacgccgatggccgcctgaaaagcagaatctatcagactcggatggagcataaactgttcagcctcatcagaaacggaagcagggagcaccaatttagccaaggcttctttttccccgcaataaatgtgatcaattccttgatgtgaaggtccgtatacaatttccgcctttgcaaacgccgcatagcagtcttcttttgacagcacttttttgcggcatcgcgctttcagctgttcaatatgcaaaaccggcgcctcagacagcggctcaatcacagcactgccttcacaataaatgtctgaatcattttcattgctgtacacttgaaatgaaacattgccgttatcctccaaagaaagccctgtcgtcatacgcagcgtctcttttttgtgaacggcctggcgtatccagctgatataccgcagcgaaatgccggttttagccgtgtattcagcggctaacggcgcggcagccagttcagccgcggctctcgccatttcaagataagccgccccggggagaacacgcttgtttcggacgatatgatcggctaagaagaattcatctccgttcagtatcgtactgaatttttgttctaacaaatctgatgtattgcgatgaagcaacgggtgaagcctgctttctgtatttactgaagtgacgggatgatcgggctccggtatccaatatcgttcctttgcaaacggatacgtcggcagactcatcctgcgcggtttctcctcctgatacagccgcgtccagtctatctcaaatccttttgaccacagctccgcaagttttttgtaagtgccgctgtccatccattttcggatcagctcctccgtatcctgatcatcgttcaggaaacccctgatttccgttccgctgtcagaccgcccttgaaagcagccgtcaatctgccgtttttgttctgtaaattcagttaatttcctgatcaagtctgcttgatcgttcactaaaaaaacaagccgctcttccattgccagccgtcccgtttgcagcgtatacgccagtgaccgcagggaaaaagattcatcaggctgcttatctaagcccgactggccgaaaagaccggaaagaatattcttatgtttctcatcgtttgtaagacattctgctaaagtccggacggaagtatgctgtatgagatcagtcatgtctattgccagcccgtattgatccgtcatcagctcagaaaactgtgtcagctgcatgacatccaagccgaattccttccaatcctgttcatcatctaccgaaccggccgcaacatgcagaacttcggccagaacacctcgcaacgcattttccagctgattttgcattgtatctcttttgtcatgaagcggcccgcttcctccaagcgctttatctttgagaaacatcagcaggcgggcagcgtattccttcagccgctccggatttttcgctgacagaggcacgatatacaatctctcttgatcctccgtaataccggggtttttaggcctgtactcttctaaaatgagatgaacgtttgaacccgtcgccccgaatgaactgatgcctgcgcgtctcgggcaggcatgttcacggccgttctctgtatacgccggccttttccatgactcggttttttgctgcacgtaaaatggcgagtcctctaaacggagatacggattaatcgtctctgagtgcaaagaagggacaagcgttttgtgaaacagctgcaaaaccgttttatgaagcccgctgatcccggcagctgattccgcatgtccgatattcgatttaacggaaccgatcgcacaaaattgccgatcctccgtaaacgtgcggtaagctttaacaagaccttgtatttcaatcggatctcctaaagaagttccggttccgtgcgcttccacataagaaatcgtccggggatcgatccccgtcttttcaagacattcagctatcatatccccctgcgccacggggctcggcacggtaatcccgctgacggtccccacgtgattgacggcgctgccttttatcaccgcataaatatgatccttatcttcttcggctttgtggagcggcttcagcagcacggctccgatgccgtcagctgagacatagcctgtgcctccttcgccgaacgtgcggcacagcccgtcactcgaatgcatatccatcaagccgtatgtgatatattttgtcgggtgcaatgataaattgacgccgccggcaagagctgcttcacattcaccgcgtctcagactttccgccgccatatgaacggccgtcaaagatgacgaacacaccgtgtcaaccgccatgctcggcccgtgaaaattgcaaaaatatgaaacccggtttgcgatcggcgcatagttcaagggataaggaaagaccagccctttagccgcagcttcagcgccggcgagagaataatccatatgcatcaccccggcaaacacaccgacgttcattctcttattcggccctttcggctgaacgattgtttccggggtgtagcccgcatcctcaatcgtttcccagcatgtttctaaaaacaatcgttcttgcggatctttagcttctgcctcccgcggagaaatccgaaaaaatttcgcatcaaaacaatccggatcgtctataaaaccgccccatttggaaatcggcttgccggacggcgatcgcaaatgctcatatgtcctcgtatcccagcgggaacgaggcacttccgttacgctgttttctccattttttaaatttgcccaaaattcacgaagatttttggcgccggggtaccgtcccgccatcccgacgatcgcaatatctccattctgcgttccggctgacgccgattttttcacgcggatttgggtcgtcctctttttttcccggggcaaaggctcagcacttgaatgcccgctttgagcatggccgaaaccggctccgtaatgttcgcacaaatatcccgccaattccgcgattgtcgtgtattcaaataacagtgtcggcagaagctgcgttccgatttttcgttcaatttcctttaccatgtccaacagccccggagaatccagccccatttcatagtagccgatatccgggtcaatctctttcacaggtttgttcaatcgggcggcaagcaattcttttaaataaaggatgcactgttcagtaaggccggcggaagcctccgcacggcggggctcagaaggcgccggttccgcttgcggagccgggacggcattccgcccgtcaggttctttctttagccgtttctgattgatcagttccgggtccctcaccagtttattggcgaagtttttcagttcgccgacttttctgccttcctcattgaaaaactccattgtcacgtaaacgagatctttcttacgggtgacggattctttttttatcttggtgatacatgttgtctgcagcaattcggtgcaataaaacgattcataaaacagcggcagaaataattgcccctcctccctcgtcaaaggagcgagatatacattggagccgatgctgctcgcatctatcaatgcgggatgaaacatcgcctcttctgcatgttccagctgatccttttgtaccgacagatcaatataaatctctttttcagtttggtagacgcttccgcagcctttcatcattcctgaatgaaccagttcttgatccctgcattccgcgtaaatgtcctcaagcggtatttctgccgccgtttgttttacggcatccatccggacgctctcttggaagccggcgggattgacggaatgcatttgcgccgcggcatatacctttgtctctgctgcttcgtcaccttgtttttgccctttcacctctaccttccactgctcttcgccgttctctgtacagtcaacggaaagcaggattgtttctccctgttcaggagctaaagggtgaaaaatcgataagtgcctgagttcaaggccggcatgaaaaaagccgttttctctgaaagtctgatagatcaggtcaatataagccagacccggcagcagttcctttccataggctttatgatgtttcagaacgggatgctgattgttaataagaagctgctcttgcatatgaacttcctccatatcgacattcaattttcagcgcaatcagtaagtcttcatttgtttccaaaacgtattcggacgggacttatgtgcgttttcatgcaggctttcggctttgtccggacgaatgggccggcgttttaattcctgtctcggcaaaggctttctaacaggggtatacgcctcttgctcccaggcttccactatgacatgagcattcgtccctccgtcagcgaagctgctgacagcggcaatccgcggtgaatccgtccattcacgcagagcgtgcgaaaaataaaacggcgaggcggacagatcgtaatgcgtcatcggctctttgcccgaaaggaaaggcacacgcattcggcgcgagagcataagcactgttttaatgaatccggcaatcccttcagcgcataacgggtgtccgatattcggcttcatcgatcccaattcacaaggcgcgctgttttgcatacggtagaccgcttcaatcgccctcagttccaaaaggtcggttacttcagagcctgaaccgtttgcttcaatgtagctgatatcctccgcttttctgccgcttttggcaagcgccttggccatcacttctttctgcgcctgtatattcggtgtggcaggccccgcggttctgccgtcattgtttacggaaatgcctttaatgaccgcatgaatccggtcaccgtcttttacagcctgggccgctgtttttaaatacaccattccgacgccttctcccaatacgatgccgccggtgcggcggtcaaaaatatgaaacgcaggctcttcgcttagcagtttgcggagttcgaacatccggtgggtttgaccggattccagcagactgactcccccgaccaccgctgagtcgatttcaccgcaagaaagcgcttgtatcgccatattcataccgacaagcgctgaagaacaggccgtatccaaaacgagactcggccccttcaaatcaaagaactgagaaagattggccgctaagtaattcggaccggctgcgactatcggattttttgcatgcttcagacggttttcatcaggcatactgccgccgcgtcctcctaaatagacaccggctgacctgcctttcatttcttgtaacgagtacccgctgtctctgaacagatgaagcgcctcttctaatataagaaaggactggatatccattgccttgatgtcttcttcgggaataaggaaaaactccgggtcaaaatgcgttacattttgtaaaaggcccgcataatccgccttctccgttttccagcgctctttcggaactctttgaatggctgacgttccttcagacagcagcttccaataagcttcaattgattcagctcccggaaaacggcaggacattccgacaacagcgatgtcttgcgccgctgcagcaccagaaggctgaataacagcggctgcagtttgtttgggaacgtccgggattacaggctgaaccggttttgaaacggcagctttgatttcgggatatgctgtttcaagccatcccgccagcgcagcaaccgtagggtattcatacagcaccgccgggtcaaggtcagctttgatcctctttccgatcgctctggacacttgggcaagcataatggaatcggctccgtaatcttgaaacggtgtatcagattcaaatcttgacggctccagtcttaattcccggcagcaaatgcccgtcagccactcctcaacgctttctgtatcggcctgttcctgctgctttgtttcagtaaggccggatgaaagcagcagacggtcaggctcccatttttccgggtgaatgacggccggcataataacagatccgcaatcgcctgccatgatggcatcaaacaggctcagcccttctctgtcagtgatgctctttaaaccgcttttctgataggcccggctttttgattcgcccatacccgtttctttccagctcggccactggatgctcagcaccggaaaaccttttgcggccgcaaaataatccatataggcgttagccatggcataatcactttgtcccgctcctaattccggcatcacgccggacactgaagaaaacagcgcaaaaaaccgaagaggctccttgtgcagcgcttgatacaaaaggtccagtccgtctgttttaggctcaagcacgggcatcatctgttcgcttgttttgcggataaaggccggatgatcgagatctaccgctcccgctgcgtgtatcacgcctcctatcggccccatttgatctttcacacggctgacggcctgctcatattcagggccggaagatacagacagcacttccgttcggatacctttttgttcgagctctctgattcttctcaccttatcggaaaacagggaattccgtttgatatgatcatcccattccgctttcggcggcattgtttcttttccggtaagcacgagtttcgtgactccgtaacgttcggcaaaatgccgggcgaataaatatccgagcccccgggtccctccggtgatccagagcacatggtctttcggaaatgaaaattctttttcagctaagctgtttgtttcctttaaccgcgcgtgatagcgcacaccgtttcggtaacacacttcgatgtcttcagaatcgcgaaaaaactcctctgcgatctggtttgccagctcaggatcttcggcagtccgttctgcatccatatgccgcgagcggatatccttatactcactttggagcatccggtacaatccggccttttttgcacctgagagatttatcgtttcatttgcaaaaggttcaagcccctttgtcacacaaagcagctgaagctttcggccgcggtttctgttgtcaatgagagactgcagacgatgaatccagccgtcatcatgattgatttccgtcccgcatccggtcacatcaatcagaccgccaaatcgggccgcgtccccggatatttccggtgatgcagcgtcaatgatttcagactcggggaaataacgggacagctcaacggctaaatttcctgtctggtgatcagcagctattccgatgacgccccgcacttccttagccggaacacggctgctttctgcccagcttttctgtaaaaagcggatttcacgaaatgtttcagaatgtgattcagcatcacgaacattgtccggcgctgcatcgtccggccaataccgatcctttataaatggataaccgggaaggctgatgcgatgcggcagactgccgttataaagctctgaccatttaatcttcagcccttttacccaaagttccagaagcttcgcgaatttttttcttttcatccatttacggacggcttcctgcatatcttcatccttaaaaacggctagaatgtctttatactgtttgctttttcccctgaagcagccgtctgtcccgccgtcaataaaacgctgcagtttttccgctaactgctctgtcgacgtcacgataaacgccgcacgttcttccatcgcttctcttccggtttgaagggtgtaagccgcatcccggaggctgcggtctgtgacgtcattttttctgatcgcttgaagaagctgctgcgcccgctgcttcaggctggcctcctgtttggcggataataaaatgactgcgggatcttcatctgtgaatggctcataaatctccctatcaggttcaatatattcttctagcaatatgtgggcatttgccccgcccgcgccaaaagaagagattcccgcgattctcggaacctctttttgcgctccgttttcctcaatgaccggccgtttccagtctgccaattcacgctgcaccacaaacggcgtccggtcgaatgcaatattcggattcaattttctgcaatgtaatgagggagccagctttcgtttttgaagctggagcagcagtttcgttacaccggcaatgcctgccgcggcttccaaatgcccgatattggatttaactgagctgatggcgcaaaaacctttatctgacgttttcgtttgaaatgcgcgggtcaaaccgtcaatctcgatcggatctccgagttcagtacccgtgccgtgtgcttcgatacagctgatcatccgcggatgtattcctgatttttcaagcgcgccggaaatcacgtcagcctgggcgctcggactcggcactgtatatccgtttgttctgccgccgtgattgatatgagtgccgcgaatcaccccgtaaatatggtccttatcagccatcgcttttgacagcggctttaacagcacggccccgacaccttcaccgggaacaaatccgtccccgccttcaccgaaacttttgcacgttccgtcttttgaaagcattcgataggcgctgagctccgcataagccgaaggatgcgtatacacattcacaccgccggcaatcgccatgtcgcattcgccgcgaaggatgttttcacacgcttcgtgaattgcagtcagcgaagacgagcacatcgtgtcgaccggcatgctcggccctttcagattaagaaaataggaaactctgttggccgctgaactgaacgacgttttcggctgcagggcgccgccgtttttccagtacattccgtacccgtttttcgtaatgcccgcaaaaacgccgacccggccgttatacagattctcaagctgttccttcgtataaccggcatcctccagcacctgccagcacatttcaataaagagacgctcctgcgggtccatattcaaagcatcacggggtgaaatttgaaaaaacagcggatcaaagaaagcggcatctttcagaaacccgccccgcttactgtaacttttcccttctttcacggccgcttcaggatcagggttgtagtacttgtccttttcccagcgctcttcgggaattttcgtcacacagtcttttccggccgctaagttatcccagtactcttcaagtgtttcagcttgcggataacgtccgctgactccgataatcgcaatcccttcttttgtctggttctcattggaaaaagcaggccgtttctttcgcttgataaacgacggaagcaccggaaaatcttcatttgccaaaacctgttctgatatgcctgaacggtggtcatcatcatttgtccactttcggcattcttttggataatccgtgacaaagtgagctgccagggagcccagtgtcttatattcgtaaaaaaccgttttggaaaggtcaccgaaaagcagagacaattcgcggttcaatttcgtcacagtaactgagtcgattccgtaggtttccagcggctcttcagtgtctatgttggaaacagcaatttttgcagtcaggccaaaaagcgttttgagctgaagaagcgtttgttcatacaaacgttcactgcggtgttcggcattggtttttccgggagcgcccgtcttgatgacaggctgcagcttcaaccccgacagggaagcccatattttcccttcttcgtcacataaatcaatataaaagctccccgccttctcttgtatctcggcccataccttgtcaggacaagattcataaaacaaaagctcgtccaatgaaaccggggcgagcgttttatattctttgccgccaagcagcgcgcatgcctctgtcacactttgcatcacacagggagggaggccgaatcgggcggattctttttggtttgtcaatggaattgatatgtctgccagcatccgtcctgctgaggcgtaaatacgctcaattcctttcatgtgctcactgtattgaacggtatcgttctgagtgatggcttcaatttgctgctgatccatcagggaaccgctgttttccttcaagcggctgatatccagcatgccaggcgcagcatcaactggctgaatcatcccttggctgtacacatcatgatgactgaaatcggcagaaaatggattgtaaatctcaaaccttttggcttcaccctctgcgggtatcagcctgatttcgatatggaacggctcagcctcagtcagaatgggctttgaccacacgatatgtgtcagccggacagcctcagtctcctttactgtcaaaacagccgcagctctcgccatttccaaaagaagttctccgggcataagctttttacgctgtaaagaaacatcagcgagaaaaaattcccggccgctgaaagctgccgagaatccctgtcccgtttcatcggaaatatgctgctgagcaagcggatgaagggaagccgcttggcgaagtcccatccgcatatcataatcgcgcaaaatgccgatcgcatcctgttttgtcatttttttatttttgacgtcagaaaaaacccggtgcagaaactctttcatatggtttcctccattacgctaatccctgtaaaaaccgatcgttctttttacagcggcttctatgcttatttcgtttttctccaattcatcaagcagacgctcataagtctcaagcggggacgtatcaatctcataagtctcccggtgccttatatgctgcgcactgtgcggtatccagcaatgtgttttcgcaaaaggatagacgggcaggctgactttttttggcttttggtccggatataatttattccagtcgacatgtaagccttgcacccataattttgcaagcattgcatactttcctgcttcaatccattgatctacggtcccgctcatttctgcgttgtccgtcatctctgtaaacagctgtttcatcgctttgttccggcctgtaaagaaattctgccccgtctccttgccgctgaggaaatcattcagcgcgttcgtaagctcttcttttgtttcagcaataacggcaaggcgctcttccatttcatcccggccaagctgaagcgtataagcgatacccgcaagagctccgtcagctgaatgtgtcttttccaaatatctgcgcagctgttccgcacgttccttcagctgttccgccgtctttgccgagagaatgaataaggacggctgaagttcaccgaccgtccattgtttctcttcaacaggagaaacatattcttcgagcacgacatgagcattgacaccgccaaatccgaacgagctgacacccgctctccgcggcagttcatttccgctgtcatcagtcgccgctttccacggctgagtgtcgcggacgaaataaaacgggctgccgtcgaggctgatatacggattaacggtttcacaatgcagacttttcacaagcgttttgtgctgtatctgcaaaataatttttaaaagcccggccatgccggcggcaagctctgtgtggccgatattcgttttgacggaaccgatggcgcaatgaggctgatctggtgccgttacttcggctttctgataaagcgctgcaaaagccgctttgagtccgttgatttctatcggatctccaagcgccgttcccgtgccgtgggcttcaatataactcactgtacgggggtcgatgttcgcttgctgataagcttttatcatgacttctgtctgtgctttcggattcggcgatgtaagggaagccgcccgtccgccatgattttccgccgttccgcgaataacggcataaatacggtcgccgtcacgttccgcatcggataatgttttcaaaacaatcatgcccgcaccttcagctctgacatacccgtccgcttgatcggaaaatgttttgcatcgcccgtcttcactgagcattcccgctttattaaagctgatatgcatatccggcgatacaatagcattgacgcctcctgcaatcgcgatgccgcagtctccggcctgaattgccctgaccgcacggtgaacagcgaccaatgagcttgaacaggcggtttcaatcggttcgctcggcccatgtatattcagaaaatagctcatacggttcggaccgattgacggaaccgtaccggcggcggaagaaccctcaatctctatatggaactttgaagcttcctgagcgtaaccgctgtttgtcgtgcctgcaaaaatgcctgtatttgaacctgacaggcttttggcagagcagcctgcatcttcaatcgctttccatacatgcatcattaaaagtctttgctgaggatccatcatttcggcttcatgcggagaaataccgaaaaataaagggtcaaattgagcggtttcatcaatgaagccgccccactttacattgctcgcatttttatctttctgcggatctccgtaatactgtctccagtcccagcgctccggcggtatttcagaaatgcagtccttttctccggctaaattctcccaaaacatttccggattttcagccattggaaatgcacagctgattccgattatcgccacgggctcaggtgcagctgcggtttttgttttaggaaggcgggacggaatcaagaatggctccgtcttcatttttttacgcacaaccggtttctccgtttctgtttctgcctgtgagccgaatgtatccggatgttccgtcagcaagtattgggcaaaacgaaagactgtcgggtattcaaaaaacacggccggtgtcagttcaagcccatacattttatttagttcatttgcaaactgcgtgaatgaaaccgaatcaaagccataatctctcatctctgattcagcatctatctcgtcttctttcaccttcagaatgcctgatatcatatgtttgagttccgcttgtactttattcggcatatggacgggcatcttccttgacacatgaatgctacgggacggttccggtgtttcaggcatcaggttttttcgaatccgttcttcgtcgccctctgccaccatgacctgatgttctccggaagcaaaagcggcgtaaagcgcttggatgcctgacgccgatcgcatggctctcattccggtctgttcgtacatcagccgttcggtctctttgtccacgcgcataccgccttcttcccaaagcggccagttgacagacagagtctgcccgctccgcttgttgtcccgcacgagacggttccggcgggctgcataaacatccataaatgcgttggctgccgcataaccggcctgccccggatttcccatgcctcccgccaaggaagaaaacaggatgaaaaagtccagccgcgcatctttcgctgcttcatcaagattgataagccctttcactttcggcgccatgacggtcttccgttcgttttctgtctggttcagaatgtaattgtcagcgatcacgccggcgccgtgaatgatcccgtcgagtgttccgtgctcctcctgtatgccgcggacgagggcgatgaccgccgccctgtctgtcacgtctaccggttgatacaatacgcgggcacccgacgcttccaagcgccgtaagcgggcggagcggtctttatcaagcgcttccgcccttcccgttaatacgaggacagcgtttttgacgcgggaggctatttcttcagcgaaaatcaggccgatgccgcccgctcccccggtgaggaggtagaccccttcgtctttccaaggaacggcgcccttttgaggcgccggcagaggacgccagtttctgacgagacgtttgccgtcttcataacggatttccgcttgttcaggatgcgcccggttttctttcagcttggcaagaagcgccgaggctgactcgtccggatcggcttggatgacttggccgtacagcttcggatgttcaaggtgagccgttttcagaaaagcggccagccccgccaatacattgtcttcccccctgtcggggacaagaagctggatcagcgtttttttcttctgtttttctttgataagacgcgtgacgatcgctgacagctccgccgcgcaggcatcataacggtcttcaatcggaccttcgccgtcagccgcacatacggcgccgcttatgtcctcagcgttcattccgccatacagcgtcacgtatctgaaagactcttcttgtccgccgccttcatccggcggtgattcctgccactttggctgaagcaagagcggtttttcctccgtttcctcttccagaaaacgggcggtgagccccgtcaatcggacacataccgcgccgttttcatcacacagctcaatatgataggcgccgtccgctgaggaaagcaccgcccacatcgtctcccggcacgcagaaaacacctgcatatcctggagggcaaacggcagaaacggccgtccggacgcggaaccgtctgagagcacgagaccgatagaagcctgaagggcggcgtccagcatgctcggatgcaggatgaacggctccttttcctcgcgggcggacggcggaagagtgagcttcgcgagcacttctccgcttccggcatagacggcgtcaagcgcctgatgcgacggtccgtaggtgatgccgaggctgtcgaacgcttcatagcactcagcctttgacaagtgacggccgccgcagcgcgcctgaaccgcttccacatcgagtaccggagcacgctccgtctcttcgagcacggcctttccctggaaaaagacaagcggctcttctccttcggcatacgcttcaaaagcgatgtctccgttttcttccggctgaagctttacatgaagcgtcactccttcagaaagcgccatcaccggacggagccaaacgatctgtttgagccggacacccgttttcccgccgggcaagtcttcggcggcaagtgtaacggcggcccgggtcatttctaaagcagccgcgcccggaagcaccggttttccattgacgatgtgatcggcaaaaaacggttcgtgtcctgaaaaaacagaagtaaagcgctgggcggtaaaggtcgatgtattcgcgtggagcagcgggtgaagtctggctgctttctcacttttcgctgagcctgttttgtcaagtgacacatcagcttttgtcacccaatatcggtctttggcaaaagggtaggccgggagactgatgcggcccgggttgcgctgataaagagctgaccaatcgacgtcaagtcctttaacccaaaggtcaaacagctttccgtatttcccttttctcagccaggcatttatggtaagcgccatatcttcatcagaagtgagtgaagccgccaatgaatgatgtttggctgtcctgccccgccagatatgagcatgttcgatattatgatcgtttgagaaactcataagcttcattttcagttcttctatcgactcggccgtaaatgcaagccgctcagccatcggttctcttcccgtctgaagcgtgtaagcgatcttggctaaatccccgtcagaacgtttttttcttatgacatcatccagaagctggcgggcgcgctctgtcaattgctgctcatttcgcgctgataaaataataacagccggtttttgcggagaaacagacgcgttttccattggtttcaggctgtcagacggcacatattcctgaatgataacatgtgcgtttgaacctcctgctccaaacgaggaaatgccggcaattctcggatattccttcatttcacccgtgatattcaagacaggtcgcttccattccgtttctttttgctgtacgaaaaacggagtgtgctcaaactcaatattcggattcaattccgccgcatgcaatgaaggggcaatcctcttatgtttcaattgcagaagcagtttggtgatccccgcaatcccggcagcgctttctaaatgtccgatatttgatttaatggaaccgatggaacaaaactgccggtcttctgttgtcaggcgaaaagctttcgttaacccgtcgatttcaatcggatcaccgagcgcagtgcccgttccgtgggcttccaagtaactgaccgttctcgggtgaatgtctgttcgtttcaacgtctctgcgatcagatcaaactgcgctttcggattcggcaccatataagcgtttgtcctgcctgctgcgttcagcatgcttcctttgataacaccgtaaatatgatcgccgtctttctccgcttgagcaagcggctttaacacaatcgcccctactccttcaccgtcaacaaaaccgtccgcactgtctccgaaagatttgcatttatcaccgggagacagcattgaaaaagcggacagccgctcatagtgggccggatcaacgataagattgactccgccggcaatcgctgtttcactcattccgctccgcaggctttctgcggcgagatggacagctgttaaagaagaagagcatgctgtatccacagccatactcggcccttggaaattgaacaaaaacgatactctgtttgcgatagaccagtcgctgggaactgtcgggtaattgctgttcatcacaccgacaaagactccgattttccggctgtcacaaagcgtggccggggtgtaccccgcatcttcaatgcttgaataagcagtctgcagaaacaacctttcctgcggatccatcctttcagcttccgcgggagatatacggaaaaacagcggatcaaatttatcaatgtcatcgagaaaaccgccccattttgaataaatggacccccattttccgcgttcctcgttataaaacgttttccagtcccagcgatcttttggcacttcagtaatagaatgcctgccggcttttacattttcccacagctcatcaacgtgatcggcgcccggataccggcctgacagaccgatgacagcgatatcctggatatagggatctccgttcgtcctttcgccttcctcgttttgaggaatcttgttttgttttacattcaggttatctatgtgatcagacagctgtgcctcacgcacacccatcgctttcataaatgctccccgctgagaaagaagcaggtaatccgcgatttcttctatcgtctgatattcaaaaaagagggtgctggtcatttggtcaaacacgttacgaaaggcatttgtgagcctgacgaccagaatagaatccaaaccgtatgcggttaaggaaaccgacggatccattctcccgctcggaatcttcagcgtttttcctattaattccgtcagatatgtgatgccccgttcccttacgtttggaatcggcgcggcgctttctgcgggagcctgcacccgtccggcgttttcgggatgagcccgtccattcccgaattgccgctcgagcgcttctttacgggaagacagaaagtaatcagcaagttcatcaatggtttgatattcaaaaaataaagtgctgctgacagaaccgaagacgtcttttaacgcgttggtcagtctgacgaccagtatggaatccaatccgtatgcggttaaaggttcatgggataaaagacgatgcgccggcactttaagcgcttcaccgattaccttcttcatcagttcaacgcttttttctctcaggctgacatgcaaagtatcatccgaaagaccttctgcgtcatacggacggcgctccggtttttcttctgacgcctgcgggagggcaagcctgaccgttccgtcactttcagccgctataatctgctggcctaagtcgtgtgcggcttcagccggaaacagaggatggacgaatccttcaagcaaaagcgcttccgcccagccggccggatcaacccccggacagcccggaatccgtaaatcatgatcctcatacagccaccagccttcaagaaggccgaacgtcacatggttgaatatggtgcggctgttgatctcatttataaacagctggccgtttttttgcagcattgctttcgcatggcgcagcgcagagcggatattttttgtcgcatgaagcacattggtcgcgatcactgcgtcatacgtgccgatgtccggcgcttctgctgataccggctgctcagcgttgaatattttataagtgacataaggatattccggaccaaatatgtcttctgcatgtaaaagaaatgctttagaaatatccgtgaaacaatattcggcaatatgcgcttcatacggtttcaattttctcatgaccgcagcgctcgtcccgcccgttccggctccgatttctaaaatgcggattttcgcctgcgggtctttttccagacgttccttcaaaactgcaatcaatgtgtcagcaagcttgtcattgaaaaaatcagaaatgatattattgcggtaaatgccttccacaagacggaaggaggagtcagggaacatcacttccgttgccggaagctttccggttaaaatgtctggaagcacacgcaatgtctcttctgccaatctgacatgcgccctcatgtctttctggcgcagccaagtctcttttttccgctcccattcctcccacacctgccctagatccgttttttccggagcaagcgctaatttattcaggaggacaaagctctctttcagccatctgctgtattgttccgttatgccggcagccgattgaaataacggcaaagcctgatcaagcccggctcccatctcataaagggttgatacaagcattttttcgataagggattccatctctctcatgcagctcatgacacttgatgcttttaaccgctcagcttcgtcattctgcgtgatgttaaccgttaattgtccgagtgcggaaggaatcttttccggataaacagttacttgttctttcagatcgtctttcataaaaaccggatctgtcgttttgatcagcgccagctggtcatgaggtccggaaagcagggtttccagcgttttcatcgcttcgggcgcctcaatagaagcgattccgtcccgctccatccgtttccggtattgttctgaagcgacaacgccgacacttccccaaaagccccaattgacaacttttacggcatacggcgctttctgtgagatccgcttagcaaaagcgtctttaaacgtgcacccggcggcataattgctctgtcccggcgctttttgaaacgacatcatcgaagagaaaaacagcaagaaatccagtggttgcccttcagctacccgggcaatctgcaagctcacatcagtttttgcagaaagtgaagcgcggaactgatcctcttccatattggcaaaacttcggtctgataacacgatggcggaatgaatgatcccgcggatctttccattttccttcacaatggtgtcatacgcccgtttgagagagtcataatccgcagcatccgcgctgaaatattgcggtgcgggacctaaagctgcaagtcttttcagctttctttcaatctgtgtatcttttttccgtctcccgatccagacaattttcgcctgataggtctgaatcatatattcagtccatacttctcctattccgcctgctccgccgataatcacataaaccccgccgtgccggtataatgaaggctcatctgcatgaggccggcaggcggccaattgctggcgatgccactgacccgcacgaaagacccacggatttccctcggggtccgccggtaaagagaagacatcgggaagatgccggtctcccctttgagattccaaatcaagaagccggatgctccaattgctgtattcttttgcgagcgaccccgctaatccgtgtatgcttgcatgactcggattgacctcatcatgttcatgaatcggctgtgcttgaaacgtgcagattgtcaatgatagttgttccgtgtcaaaattcagaagcagaagcgcttttaccagccggaaaagctgcatgaccccgtgctcctgtccgtcggccgtatccgcatcataaacggatggaatgggatgatccggcgccgcccatatcatgtgttgaaaagagccttgcgctttcaatgtttcagccatttgttccgcgctgtccaaagaagtgatgtccggaaaacggacatcggaatacatctctttcaaagcctgctgaaaattcggcccggccccgatgacgattattttttcttcacgcatgaaagacatgccggtttccggaatggtgacggtgttccaaatcggtgtcataagcaattccgtttcacggcttgtcttcggcgtgacgccggctttttggttaaacccggcgctttcctgcacctcttttatgataaaatctttcactgccgccaacagcacgccgcgctcatcacaaatatgcagatcaaattggtgaacggaggccgcttttacctccgcatgcacaaatacggttttcgctaacggttcaagcagctgtatttctccgaaggaaaacggtacgataagcgcaggctctttttgaaattgcagcacatgcgccattgcagtttgaacagcgccatccattaaggacggatgtaggatgtactgtttaaaatcggcttccaagtgtgacgggagcgttaatttggccagtgctttcctttctgtataagagaattcgcggatgacctgaaaactgtccttttgcacgattcccgcctcagagaacgagtgatagatatctttcggctccgttctctgcgcaaatggcgccgggagctgaaagaccggggcctcaaaagatgctcctttttctttacaaatcacttccccttgcgaaaagagagcgccgtccgctcctttttctttaatgacatagcttatacgctctttttctgcttcaaactctatcatgacggatcttgggtctgtccctgtcacaatcggctccatgtaccacacactttgaagagagacgaccgggcgttctccccacaatcccgcgccgtatgccgccatttccagatgacagactccgggaagcacatatttttcgttcactaaatgatctttaaagaaatattcatccttggaaaatatcttttgaaacgtccctttccgggcggatgaaacattctcatcaagcagaggatgcaacgcttcacgccttttgatattttggggcttttttgtataccgctttttctgatcggtcagccaggacgtttcctttaaaaacggatacgtaggaagcggaactttctgatacggcgtttccggctttttgcaaccttgaaggcctttcacccacagcgcggcaaatttctcaggatctgaaacggattggcctgaaacgtccggacgcccgggtgacgcttttccgaagtacatatacctgccgtcgctgtgaccgcttacaaatccgtccaatcgccgtttcagctcagaaagggatgatgcaatgacagcaagccggaaggagaaaggctctctgcctgacaataaggtggcagcgatattttccagactgtatccgccggcagaaggcaggttttccaatcggtcaagaaaggagctcaatttcccggcatattctttcagctgctgttcggaatgtgcgcttaatacgacggcatgcggtttttgctcagtattcttgtccgcttgccgttttggctgataagcacctacgatcagatgggcattagagcctcctgcgccgaatgaactgattgcggcgattctcggtttatctccttcagccggccacggccggttgtttcggacgacataaaatggcgaatcagaaaaagaaatcttgcggttcagttcctcggagtgcagactggcgggaagcgtttcatgtttcatgcttaaaagcaccttgattaaaccggcgatccctgcagccgcttccaaatgtccgatattggatttcaccgagccgattccgcaatagtttttctcatcggtctgtttatcaaatgccatagacaggccgcgtatctcaatcggatcgccgagtgccgtgccggttccgtgagcttcaatgtagctgatatccgccggacttaccgcggctctgtttagagcggataaaatcaggtcccggtgcgcttccggattcggcaccgtatacccggtcgttttgccgccgtgattagtggcggaccccttaatgacaccgtagatgtggtctttatccgcaatcgcttttttcagtggttttaacaaaacggctcccgcgccttcgccgggcacgtaaccgtctccgccttcaccgaaactgcggcattttccttcagaagacagaaaatgcgattggcttaaaaacatgtatttttgcggatgtaagctgaggttgacgcctccggcaagcgccatttcacagtcgcccgacataatggcctgacaagcctgatggacggcgacaagcgatgaagaacacgccgtatcaacagcgatgctcgggccatggagatcaaggaaataagaaacccggttcggaatgccccaatataaggagccggggcctttgtactgatctttgaggaaaccttcttcgtgtgcaattaatgaatattcattccaggtcactccggcgaatacaccgatttgatccgtcggcctcgccgccgggttcccgtaaccggcatcctccatcgcttcccagcagcacgtgacatacaatttttgctgggggtccattaaatcagcttcccacggggaaacagaaaaaaacagcgggtcaaattgatccggatgatcaataaaacctccccatttactgtatgacgcgtattctgccgttttctcttccgagtaataagagctgtcccatctgtcctctgggatttcggagacacaatctttattttccattaaattgtcccaaaaatcatgctggttttccgctttcggaaacatcccgctcattccgataaccgcaatatcagagctcccgtccgttgccggttcaggcaccttttcagccgcctgtacgggaagcaattcttcttcctgcgggcttcccgtatcaggctccgtttctttgaattcaagaacgctttcgggatttcgtttctgcgcacttaaaaactcactcaatttctcaatgttcggatattcaaacagcagcgtttcagaaaggccggtaaactctttatgcaatatggtcatgatttcttcactgatgagagacgtcacgccaagagtaaaaaaagcggttttatcttccgcttcggtcacctcggcacccagcttttccgatattaccgttcttaaaaattcgttaatacatttcatgaggataccatcccttgtacaaaagaatttttctgtgctttaacaagttaatccgccgtctattgccattgtctgtccggtcataaaggacgattcaggagaaagcaggaaacgaacgagtccggtcatatcgtctgtttcgcctaaacgccccatcggcgtccttctgataatctgcgatttttgtttttccggcatatttttcgtcatatcggtgtccacaaaaccgggcgcaagtgaattgacacggattcctttagacccaagctccctggccaggcttcgcgtcaagccgtcaagagccgctttggatgcgctgtagactgaagtgcctttaaatcctcttgagccgataatggagcttatgttaacgattgatccggaattttgtttcagcatgacacgggaaacgtttcgggtcagcttgatgactgaaccgatattcagattgaggatgcggtcaatgtcttcatcattggtcaggggcagcagctgatcaaggttcaaaccggcgttattgaccaagccgtctattctggaaaacttgcggtatacttgaagaacaaactgtttcatggcggcatcatccgccgcatccgccgcttcccaataaaagcggccgcggtacttttcactctctctcaatgtgttaataaaatcagattcactgcggctgaaagcggctactttgtaatcctcatccaaaagcgtctgtacaatcgcttttccgagcccccggcttcctccgctgacgaccgctacttttccgttattcatatttgcctcctgttttacacgtttcttatttttttaaatcggtcattagacagtttccgatctgtaacagagatgatctgcggtatctgatatggctgcagcttttgtttgcaatgagctacggcccgctttctgaaagatttgatatcttcctctttttcaagcacggcctctgctgcgacaatctcgcccgtaatcggattttttcttcccgttatgagaacatcccggacattcggtatctccagaaagacgctttccacctctgccggaaacactttctctccgcccacattaatgatttcactctttcttccaaggattcttatatattcgccgtctgtttccacctggtcaccggtgtcataccagccgtcttcatcgaaaggtgacggtgcgtttaaatagccgagcatcgccgactcagaacggacccaaagcgtgcctccggtaattttggtctctgttccggcaccgcccactttcatccaagtggattggctgtcttttgatttcgttgagaatatacccagttcagttaatccatatgtttgtttcagccgtacatccggaaacagccggtgaatgccgcgcagcgttgattggggcatcggttctgtgccgtaagtgatcagccggagtgaagagaggttatagccggcatccgccttggacatcagcagcatgtttaaaaaggtcggggtggcggggagcacttggacagcatgcttgtcgaccgcctgataaacggactccggcgttctgctgtctgatgtgacgatggtccccccgttaaacagaatcgcaaacagcgtattaatgccgccgatatgatccaatttcagaaaaatgagcgtacgcagcggttttctcttcgccgttttatatttttcaagcagccggccggcgcttaacacggatgctttgcttttgccggaagttcccgatgtgaaaataataatgcctgactcccctctctcgcgcaggtcatcaagcagagggtgagaggcgctttcagaacctccacgaagcgtccagctgtcattttcatttatttcaatgatttgattcactttcgcgtcttcaaacatatcgagatgcttttcccttgattcattgcttagagggacaacgatatttcggtttaacaaaagcgccatcagcaaaaaaatagcgttcggggaataatccccgataagcgccacacattctccttcacgtattccgttttgttcaagttctttctgaaaaaagctaattcgtgccagcaaatcatcatacgtaaaagtctgccctttaaaaatgagaaactcactgtcttgcgtttccctaagcttatcagtcacccagctgatatctcccccgctttctgttttcatgattgagcactgtccatatatttttgataaatatcacaaatgctgccgacggttgtaatgcttgaaattgtttctccttgggaaaaaggatctactccggtttccatctccatctgtgcgactaattgagcgatatccagtgatgagaagcccagatcctctatgactctcacatcatctcccgcttcgacggcccgatatgactgctgttcttgaatgtcctgaatgatttgagcgatgatctgcttcatttccttggtttgttccatttgctttcagctccattcttcattttataaacttctgatgacccgcttataatccggaatatgatcttgtgaagaggtcggcaccgccagcagcttgtccaccttggaaatggccagcaatgtatgatttcttttcatatagacttcaatctgatagctgattttcgccactgagatcataccgagggactcaccgtgaaagtcgggatcgcattcttcaatgtgtcccgtcatataaatatcaagctcttcatctgcaaaacaatttccgtaataatacgtctctctttcaagcaaaaataaatgccgcgcgattgaaaccggaaaacccggcttcgaccggcgcgtcatccattcaaattccgccgtatccattatcttgctgaatttcgcaaacaccatggcatgcccgggcgcagcatcctgatcaataggaacccgatatgaaacggggtctgctgttttgagattgcccggcttcataccgaaggcgtccgttctgattttctttgaccgcatcagcgcgtaaggcggcttggctagcttagaaagttccgcaatgcattcagccttaggcgctgagactttgcgcgtcgaaccttctgtttgtgtgacgtcgacgacaattaaactattggctttcatagaaggaaaccgtccccggtcccactcgcttttatcagagctgaccgctcctttcggcccgaacaaataatcagattctaatatggtttctccaaaccgggagatatcgactccgacggaaacctcgtcccataatcggtactgatcaagaggctgatctgaaggaactttgagatgtgtcataaaataagccggatacaaaatcagcccttggtgatcggccatctgatcaggccggaatcccgttccgtccgttaaatggtgactgtgtgcgttgccgaataacagcagcagtgcgtactcattcaaattccctaacccgacatggctcatcgttaattcatgattttcaatcagcatggtctgtcctccgcagaaaaaatgtaatggctggtcatactcagcctgtaatcgataccagcctttgcgcaagaaggccggctgtttcttccatgagctgtttgccgatcagatcgacatgcctgtttctccaattttcaagcggggttcctttcacccattgattaaacgcgccgagcgcagggccgcaatgaatttggtaatctattttactttcgctttttccttccagagcgagccttgtcgtatgagaaaaataccatttaaataccatcgccattttgtgtttcggattctgttcggctttggcgatctgctcaggagatttatcacgtttcaactgctcatacacttcttcaaaaccgcactggaaatacttttcttcaattaatattttcgttttttcatctatttcatctaaagaattgtattgtctgtacaagtcaaagagtttattggctcttgccgggaaaaacaggccttttttcagcacctgcacccttgctcccgcttcaaacatatctcctgcgggagcgtatgacgtatcctgcacgttcgcttcctgaagcagatctttcactgaatcacttgtcccggcttcgaccgtgcattgattaatagaaccggttccgataaattcggcgccgagcagaaacgcggcagcagccgcttccggagtgccgatgccgcccgctgcgccgattcttacttttttcgcataaccgtgcttctccatcatgcggtctctgagtctgatcatggcaggcattaatgtatacggaatcccttggtcggtatgccctcctgaatccgcttcaacgcaaatgtcatcagccatcggaatttcttttgcaagcgccgcttccccggctgtcagccgattgtcagacacaagtctttccagcacatgagccggagccggattcagaaaggcctcagcgacttcaggccgggatactttcgcgatgattctgttttgaactgacaccgacccgtcatgattcctgcttagtccccttgccctgtatataacaagagcgggggttatgcccataaatgccgatgcttcaataagatgaatgctgtttttcaaatataaatctatcattctgacttccttgtcaggtgacatcatatgatgaagaagattcattccgaatgtttccccttgccgcagtgcagaccggatggttccgatggcctgtccgatccgttcgatactcaatccgcccgttccgaaaaagcccagcattcccgcttttgccgctttaatgaccatctgttccgaagcaattcccctgtacatggagcccgtcatgtaagcatattggatgttataatcttttttaaaatcttcgttccctaatctcattcccgccgttttttgcggatcagctgccgatgctttaacatcagcagtatcagactcttctttcggcataggtaatgggacggcatcttttttaatctgacgcgtcagttttgtcagcacttccccgggcccgacttctgcaatttcattattttcaagtcccatcagacggcgtatcgtgtccgtccactttacctgattggtcatttgcaaagtcagatttgttttgatttcatcattcttataaggtgcggcatgaagatttgagatcaccggaaaacgaagaggcaaaaacgccgtttcttctaaataatccgcaaactctttttcagcatctttcatatagcgggaatggaaggcgccgctcacatttaaaggaaggtacattctcacgccggctttttcaaagacggggcccgctttttcaatgtcttgtttcgttccggcgatcacaatttgcgaaggtgaattgtggttagcgatatcaatgccggtcagatgataatcggatagaacctcttttacttgttcagcggtaaaccccaaaaccgccgccatgcctccgggagctgccttgctcatgagctcccctcttttttttacaagctgcaaaccggtctcaaaatcaaagcagccggccgcaaataacgcattatattctcctaaactgtgccctgcggcgtaatcaggctctctgccggactctttcattttctttaaataactgagtgcactcaccgtatataacgccggctgggtaaattgcgttttccccagctggtgattcgggtcctccagacacaattcttctatagagtagcctaatatgtcatcagcctgacgtgtcagatcttgaaattcatcaaacagtccggctcccattcctttaaattgagaaccctgccccgggaacacaaacgtaagcatcttatcctcatcctttccgcatcgccaattttgtacatcacatgtggatctccatacaaaaacgtctcttatttcatatattgactggtgtaaacaccggcataaaaataaaaacacaaacgcgtttgcgattcagcacaggtttaaaaatcgcaaacgcattgtgttttccttttctaacataatttatataaagacatcttgcttgtttactgaatgtttcgcatgacaagctgcagtgccaatatgcccgaaaacagccatgacggcacacttctcccttatcatgtatatgtagatatatacactacaatcatttttataatccctatttcctcttcaacgtgccgaaacagcgattgaaatttaataggtgctttacatcaatttaataaatttaacaaatagttgctatttaaagagaataatatcaatttatagataataatgtcaaggatttatttcgttattttctgacatttattccacagttttatgttcggtggacagtcggcataattgtttcgggataaatgtcagataattccctgaacccttttcatgtcaaagaaaatttcatcgcttccctgtcaattgggtctatacttatttttcattttcgtatattatgtaaaaaaaagacgaattagaaaaatttttaatcattttaaatagtatccattaaatactttctttgtataataatttcttattattctaaggaggacccagtcatgaaatggtacgcactttttgtagagtccggaaaagaagaaacagttcaaaaatttctgcgtctgcagtttgatgagcaggctctctactcaatcatacccaagaaaaaagtcacagaacgaaaagccggaatcaaatacgaggcactcaaaaagatgtttccgggatatgtgctgtttaaaacgaagatgacagagcggacatttcataaaatcaaagaactccccatttcatgcagaatcgtgaataacggcgcatattattccaaagagcgtaaaacctatttcacgacaattaaggatgaagaaatcctccctatcatcaggctgatcggagaaggagacactgtagattattcaaaagtctatattgaaaattcaaaagtaaccgttgcctcagggcctcttaaaggaatggaaggcattattaaaaagatcgataaaagaaaaagacgcgccaaaatctgcctgtcttttatgggactggacaaaatggtcaacgtcggaattgaagtgctctccaaaccctagcatttcaaaaaaagcatcaacagcatgtgccgttgatgccctttttatatacaaacgaaagcccgacaccgaaataaccccgctcaccaccgtcacggtcagactttttgttttcaaggcgatcacgatggtcgggataagcacgatcaaacccggccaattgatcaaaagcgtttgctgtaagaatgcagaccggcacataagaaagccactttaatacaggctgcgcccatgacgttactgaatattcacttacagctgaaaaatatgagccccgacgatttcagagccgctcaaaaaaacggaatattcggtgccttcggcgcagtgatcttcatcagcagtattttcatcctgacaaactggttcaaaggaggccacgcagtcatcggtgcgtttctcatctatatttgctatatgatcggctgtaaatgcctattatgaagatacggccccgatgtgtataaaaaaatgcccgtccagaacaataagaacgatgtgttcggttgtgagcagtttatatgactgaatgatcatgagttgttataatcaatgtctaaaaacattccgggaggcgaaataaatggcgagaaaattattcacaccatggaccgttaaagatgtaacgatcaaaaaccgtattgttatggcaccgatgtgcatgtattcctcacatgagaaggacggaaaactgcagccttttcatatggcgcactacatatcgcgtgcaatcggacaggtcggcctgattatcgtggaagcgacagccgttaatccgcaggggcgcatttccgatcaggatttgggcatttggagcgatgatcatatcgaaggttttgccaaactgacggaacaagtgaaagcgcaaggatctaaaatcggcattcagcttgcgcacgccggacgtaaagctgagcttgagggagacatttacgctccgtcagccattccgttcgatgagcagtccaaaacaccggctgaaatgacgacagaacaaattaaagaaaccattcaggaattcaaacaggcagcggcgcgcgcgaaagaagccggctttgacattattgaacttcatgcggcacacggctacttaatgcacgaatttctgtcccctctgtccaatcaccgtacagacgaatacggaggctcacatgaaaatcgctaccgcttcttaggcgagaccattgaagccgtcaaggaagtctgggacggcccgttatttgtccgtatttctgcatcggattatacagacaaagggctggacattgcggatcatatcggttttgcgaagtggatgaaagaacagggagtcgacctcattgattgcagctcaggcgcactcgttcaagctgatattaacgtcttccccggctaccaagtgagctttgcggagaaaatccgtgaacaggccgaaatcgcaacaggcgccgtcggtttgataacgacgggaacaatggccgaagaaattctgcaaaacaaccgcgctgaccttatttttgtcgcgagagaacttctgcgcgatccgcattttgcaaggagtgcagcgaagcagctgaatactgaaataccgtcaccggttcaatacgacagagcatggtgatgaagtgacagccggagtttttcgatccggctgtctctttttttattttttgagaaacgattgccgaagcttctccgtcttccctatagaaccaattagaggggatgactccaatgaaagcagcatggatggaaaggacatatctgattgacgggtgtccgttttatacgaaacaccgtaaaggcgccggcgaagtgacgatcgtctttgaagccggttacggcacttcttctgaaacatggacatcattactcgctgacatagatgaagaatttggggttttcacatatgacagagccggaatcggcaaaagcggacaaagccgaaacaagagaacggcggaccacatggtacaggaattaaacactcttcttctgaaggccggcgtcaagcctccttatcttgtcgtctcgcattcatacggcgcgattatcagcagactttgggcgagccggaaccgccgggatattctcgggatggtgatgcttgatccggtttctgaggatcaggagacgaaagtgcttccgcttcttcccgaagaaatgaaagccgcctatttgaaacaattcatattggaaggatcacacgcggaatttttgacgagccttcgtcagatcaagcatcagcagattcatttcggcgatatgccgctgttgattttatcatcgggagagcgggatgagcgcttaaagcacgctcatgaacaatgggtgaaactgcacagaagcatgcttgatgtctcttatcaaagcggatggattcaggccaaaaacagttctcatgccattcaccacgatgaaccgcacatcgtccaccttgccatttatgatgtttggtgcgcggtgcgccagcaaatgaatgctcctgcctatcaggcggtaaactgataaaacaaaagccattgtgcaacggcacaatggcttttgttatcgtgatctattttgtctcacgatgcaaagtatactttttcaaccggggtgaatactttttcatttctaaccggtccggattcgtccgtttgttcttcgtcgtaatataatttctgtcccctgtctctgtacaggccaatgtaacattcacacgcatcattttcaccccttatacaaatcgtaattattacgctttattatatctcatcagaaaaaaatgtcaagcgtccattttttaagaccgctccacagtgacctccatgaagtcaaatgcgatcttactgttttcaaacaccgctttcgcctcatgttcgagacgctctatcggcgattcaccctgataccttgcgctgatatgagttaagatcagctgtttggcgcctgctttttttgccgtttgcgcagcctgttctgtcgtcgcgtgataataattatgtgcgagctttgcatcttccttggcaaacgtcgcttcatgaacaagcacatccgcattgcgcgccagctccgttacccgctctgatgccctcgtatccccggaaaaagcgacgattctcccttttttcggcggttccaaaaaatccttcccgttgattattctgccatcgtcaagtgtgaccgtttcgccttttttgattttctgatagacgggtccgggcgggatattcatttctttcaatctgccggcctgcaatgcgccgggaatatccttttcctgaacccggtagccgaacgcttccacgccgtgaatgacggatgctgcggtaacaatgaattgctcatcttcaaaaaccgtcccctcttcgatttcatgtacagtaagaggatacgtcagatgagtcgccgtcacgttcaggcttgtttcgataaaggctttaatgccttttggcccgtaaatcgtcagctcttcttcaccgccctgaaatgaacggctccccaacagacccggaagaccgtaaacatggtcgccgtgaaggtgggtgatgaaaatcttttcaattttcctcggtttgattgttgtatgtaatatctgatgctgagtggcttctccgcaatcaaacagccatacggaacgcctttcttcaagaagcttcagcgcgacggacgttacgtttctcgtctttgccggcatgccggcccccgtccctaaaaataataattccacaatgcttcctcctagatctttgtactactaaggatacaggatcagactgaaaatgtgaattcacccgggccttctccggcctgattaatttttttccgcaaaccgcaaaaaacaggctgaaatgtttgctttcaatgaattttagatttaaaatgaaggaaatatgcggggttttaaaccatgcttcagataaagtgaggtactctaagtgaaaacaaacgacaaaccaaaagcagtaattgtaatatttggtgccacaggggatttggcaaaacgaaaactttacccatccattcaccgtttatataaaaatggtcaaattggtgaagagtttgcagttgtaggtgttggaagaagaccttggtcaaacgaggacctccgggaaacggttaaaacgtctgtttcttctgccgggcaaaaagacatagacgatttcacatctcatttttattaccatccgtttgatgtaacgaatccgggttcctatcaggagctgaatgtcctgcttgatcagcttgaacatacatatgaaatcccgaacaacagaatgttttacttggcgatggctcctgagtttttcggcacgatcgcaaaatcacttaaaaacgaaggtgtcacagcgacaaatggctggtcccgtctcgtcattgaaaaaccgttcggccatgacctgccgagtgcgaaagagcttaacaaagaaatacgcgaagctttcacggaagatcaaatttaccggatcgaccattacttaggcaaacaaatggttcaaaatatcgaagtcatccggtttgcgaatgcgctgtttgagccgctgtggaataaccgctacatctcaaacatccagattacatcaagtgaggatcttggcgttgaggatcgtgcgagatattatgagaaatcaggcgcactccgtgatatggttcaaaaccatattttacaaatggtcgctctcttggcgatggaaccgccgattaaactgaacacggaagaaatccgcagcgaaaaagtgaaggtgctgagagctctccgccctgtcgccccaaacgaagtgagcgactacttcgtccgcggacaataccaagcgggaacgattgacggaaactccgtaccaagctatacagatgagcataatgtagcaccggattccaatacggaaacattcgtgtccggaaagctgttgatcgataacttccgctgggccggcgttccgttttatatccgcacagggaaacggatgaaagaaaaatcaacgaaaatcgtcgttcaatttaaagacattccgatgaacctttattacggcaatgaaacgaatgtaaatccgaacctgcttgtcatccatattcagccggatgaaggcattacactatatctgaatgctaaaaaattaggcggagccgctcatgctcagccgattaagctggactactgcagcaactgcagtgatgaaatgaacacaccggaagcctatgaaaaattaatccatgactgtctgctcggtgatgcgacaaactttgcccattgggacgaagtggcgctttcatggaatttcgtcgatgcgatttccgaaacgtgggcagccgacaaaaccctttctccgaattatgaagccgggtcaatgggaccgaaagcttcggacgatcttcttgaaaaagacggtctccactggtggaatatataagaaaatatcaaaaaccgcggcgccgttcatgacggcccgcggtttttaatatcagaaaagcccccgcaataactgcgggggcttcttcattacttcatccattcagtatggaaaataccttctttatctgtgcgttcatacgtatgcgcgccgaagtaatcacgctgcgcttggatcaagtttgcaggaagcactgccgtacggtagctgtcgtaatacgcaagtgcgcttgagaacgaaggtaccggcacgccttgggctacggcaagtgaaatcacttggcgaagggcgccttggtagctttctgcaatgtttttgaagtagctgtctaacagcaggttgtcaagctccggttcacggtcatatgcgtctttgatcttttgcaggaacgccgcgcggatgatacagccgccgcggaagatcatcgcgatttcaccgtatttcagatcccagttatattcttcagacgcggctttcatttgggcgaagccttgtgcgtaagaacagattttactcatgaagagcgcttttctgaccgcttcaatcagctcttctttattttcagtgaccggcttaacgtctggtccggacagtaggccgcttgctttcacacgctcttctttcattgcggaaatgaaacgcgcaaaaacagattcagtgataatcggaagcggcacgcctaagtcaagagcgctttggcttgtccatttacccgttcctttttggcctgctttatcaaggatgacatcaacaagcggtttgcccgtttcttcatcttttttagtgaaaatgtcagccgtgatttcgatcagatagctgtcaagctctcctttgttccactcagcgaatacttcgtgaagctcttcggcagacaatccgagcacctgtttcagaatgaaatatgactcagagatcagctgcatgtcaccgtattcaataccgttgtgcaccatttttacatagtgccccgctccgtccgggccgatgtatgtcgtacaagcttctccgtccactttagcagaaatggcttctaaaatcggttttacgagttcgtgcgcttccttttggccgcccggcataatagaaggccctttcagcgctccctcttcaccgcctgatacacccgttccgataaagtgaatgccgctttcggcaagctctttgttccggcgctgtgtatctttatagtatgtatttccgccgtcaatcaaaatatcgtctttttccagatgaggaagaagagattgaatcgtcgcatccgttgcagttcccgctttaaccattaataaaattttacggggtgtttcaagagactggacaaactcctcaatgctgtatgtaccgacaacatttttgccttttgcctcttctaaaaactcttccgttttgctgcttgatctgttgtatacagacacagaaaatccccggctttcgatgttaagagccagatttttacccattaccgcaagaccgataactccgatttgttgttttgacatattctaacgtcccttcttcaaacgtttaaccattttaaaatttaaattaaaataaaatgatatttatactaaagaaattatcatacataaccccttttttcaagttattcaccttttcttttcatcctggaaaaagtctctgttaaagctcgttccccttgttttgctttcttctttttttataacggcgccttttctgatcaggttttggccgtacttttcattcagctcgttcatcatctgaaaaatcggctcatcctttgcgtcctccttgaatgaaaacagatcaagctgtttatacgcctgctgtttttcaaccagttccgttccggtgatgccgagaagccttaccgggttttggttccagtgcttgtcaaacagttccatcgccgcttccatgatgtcttttttctgatcagccggattgctgagggtcatgcttcttgtgactgttttccaatccgcataccgaatcatgatgaacagccggcaggccatgacctccttacgctggagccgttcgctcacagacagcgcgagccggtcaaacacgcccgttaattcatcccagtcagccgaatcatgcgacagggtggatgagttgccgacgcttttaaattcataaatccgctcgggattgacttctgcaggatggatgccgttcgctttatccttcagcctcgggccgtttatgccgagaagcgttttcagcgcatgttcatctccttttgccaaatcaccgatcgttttgatgccgagcgtttttattttttccgcagttttcgttcctataccgtgcatctcttcaatcggaagaggccataatacgtccggcagctctctttttcttaaaatggtgatgccgagcggttttttcatgtcagaagccattttagcgagaaatttattcggggcgatgccgatgcttgacggaagcagaagctctttttgcagtctcgcctgaatgtcttcggctgtctcatacgccctgtggctgtgcggtgtgtccgtaatatccatgtatccttcatcaatagaaacaggctcgactaaatccgtatactccctcagaatgctgaacatttcttttgacgaactccggtagcggtcaaaattcggaggcacgacgatgagttccggacagaggcgttttgcccgccacaccggcatggtggtctttacgccccgcgctctcgcttcatagctgcaggtgacgatgattcctttccgttccttcacgtttccggcaacggcgataggttttcctcttaaagacggatcatacgccatttctacggaggcataaaaactgttcatatcgatatgaaatataattctcccttttccggccactcccggcgcctcctttcctttcatagacaaccttatatatatgtagtaaaataagagctgaatggatgtgataaaatgattcttgagtcaatgaatgactttttatttttagtcgattttttcacaattattcttcccgctctgaccgcgatcggcatcgcttttcttttgcgtgagcgccgcgcaggcgagcattggagaacgaaacgaatagatgaacatcaagcagtcgttcagctgaaccgaacagactttcttattattatatatcatcgcattacaacttggatacgtaaagtcatccgcatgaattcaccggcgaatgatgatgaagatgtcagcttcctccttttataacggcaagtgaagataaaaaggaggagacataattgtctaaaacatatcaaaaatggatcgcattcggattgttttttatcgtactgtgcacaggccgctcggcttttgcggcgacatctcagactcagacgggaggcctcgggaatatcggttttttccacgattacctgatcgagccgttttcggcacttttaaaaggtgtggcgggcctgttccacggtgagtacggattgtcgattattctggtgacgattatcgtccggatcgttgtattgcctttgtttgtgaaccaatttaagaaacagcgggtgttccaggaaaaaatggctgtgatcaaaccgcaggtcgacagcattcaggctaaaatgaaacaaacgaaagatgcggaaaaacaaaaagaactgcaaatggaaatgatgaagctttaccgtgagcacaatctgaatccgatggcaatgggatgtcttccgatgctggtgcaattcccgattttgatcggtttttattacgccatccgctcaacgccggaaatcgcttcacactcatttctgtggttcagcttagggcattctgatattcttgtatcactgtgcgcgggggccatgtatttcttacaggcttatatttcccaaaaattaaacgagaaatattcaccggctgctcaaaatccggccgcaatgcagtcagcaaaaatcatggtctttattttccctgtcatgatgaccgttttttcacttaacgtaccggctgcgctgccgctttactggtttacaagcggactgtttttgacagtgcagaatgtacttttacagcagacgcatcataaaaagaaacaagctgcggctcaggcggagcccgccaaatcataatactgaaaccctgccggaacctatccggcagggttttttcttgtatctgcaaggctttaagccaattatcatgaagaatgaaaaaagcacccaatcaactgggtgcttcgtttttagttggccgctgtttcgataatggcaacgaccatttccgccgttttgacgagctcttcaatcggcattttttcatttttcgtatggatttgttcatagcctactgacaggttgactgtcggaatgccatggccggcaatgacgtttgcgtcacttccgccgccgcttgtctgaagttcgctcggccggccgatttttgccgccgcttttttcgcgacttccacaacctgatcgccgtcctgatatttgaaacccggatacatgaccgcgatgtccacttccgcgcggcctcccatctcagctgcagcagattcgaaagcttctttcattttctgcacttgcgcttccattttttcaggcactaatgaacgcgcttcagccagaatatcaacctggtcgcagacgatattggtttgcgtgccgccttcgaaacgtccgatattagccgttgtttctttatcaatacggccgagcggcattttagagattgcttttgatgcgattgtaatcgcggagatgcctttttccggttctacccccgcatgagccgttttcccgaaaatggttgctctcactttcgcttgtgtcggtgcggctacaataatgttgccgacttttccgtctgaatcaagcgcaaaaccgtatttcgcggtaatgtctgaacgatccattgcttttgccccgactaatcccgattcttctccggccgtgataatgaattcaatggtgccgtgctcgatgttttgttctttcagcactttaatggcttcaaacattgcggcaagacccgtcttatcatcagcgccgagaatcgtcgtgccgtcggattttacatagccgtcttccacaatcggcttaacgcctttgcccgggacaaccgtgtccatatgcgatgtaaaataaatcgtatccgcatcttttgtgccctttaacgtacagattaagttgccggctccatgccccgtcacttcttttgtatcatcttcttttacgctcaatcctaaatcagtgaatttttgtttgagcaccttgctgatttccgcttcatgttttgtctctgaatcaatttgaacgagttcaagaaattcttcaagcagacgtttttcgtttaccattttcagttccctccgtttaaagcggtatattaccgtgcttttttttcggtctttcctcttccttatgcgcaagcatgtcaaatgcctgaatcaattttttcctcgagtcttccggccggatgatatcatccaccattccgcaggccgccgctttatacggaccggcgttttccttttcgtatatggcttttttttcgcgcttcgttttctccgggtcgtcagaagcctgtatgtctctgctgtataaaatcgacgccgcgccttccgctcccatcacggcgatttccgcattgggccaggcgaatacaagatctgccccgagccctttcgaattcatggcgacataggcgcctccgtaagcttttctgatgatgagcgtcactttcggcaccgtcgcttcggcaaaagcatacagcaattttgctccgtgacggatgattcccgcatgttcctgctgaaggcccggaagaaacccaggaacatcagcgatcgtcaatagcggaatatgaaacgcgtcacaaaaacggatgaatctcgacgctttgtcagcggcatcaatcgtgaggctccccgccaagtgtttcggctggtttgcgacaacaccgactgtacgccgtccgagtttcagaaaaccgacagcaatgtttttgccaaaatacggctgaatgtcaaaaaacgttccgtcatccgccagctcttttattacctgtaacacatcgtaaggtttcgaactgtccgcgggaacgagggtgtttaataacggtctggcgtcttcctttttaacgggcaatgccgtctgtccgccgtgcgggagataagaaagcagggttttcacagcggaaagagcctctttttccgttcgtgcggaatagtgggcatttccgcttatcacattatgtattcccgcaccgcctaaactttccgcgtcaatctgttcacccgtcacctgttcaatgactttcgggcctgtaataaacatgtgcgacgtatgttccgccataatcacaaaatccgtcaatgcgggtgaataaacagcaccgccggcacacggcccaaggatgacagaaatttgcggaatcactcccgagtaaaggacgttgcgcctaaagatatgaccgtatccatttaatgataccacaccctcttgaattctcgcaccacctgagtcgttcagcccgatgatcggagttttatttttcgccgccagatccattaccgccgcgattttttccgcatgtgtctcgccgagcgtcccgccgagtacggtaaagtcatgggcaaacaaatacacgggccgtccgtcaattgtgccgtatccggtaacaacgccgtctcccggagcattctggcacccgggcatgcggcttttggcaaacggctgcagctctgaaaaactgtcttcatccaataaatagtcaattctttctcttgccgtcagcttgccttttttgtgctgtttttcatttttttccgctccgccgccgtttgttaaaaaggaacgtctttcatttaagtgtctgatatgatcactcatgctcatcttgagtttctcctttttcaattgtttcacaaagctcaatcaggaccccgttcgcctcttttggagagagaaatgcgatcttcttcccgcccgctccgttttgcggttcatgatggatcaaagtcatgcggcatgcttcaagctccttgatcgtttccttcatatcggcgcagcggaatgccaaatgatgcagcccttcgcctcttttctgtaaaaaagagctgacgggagacgcgtccgacagcggctcaatcagctcaagctttgtgcctcccgcctctaaaaaagcaactctcacattttggccgcttaccagctcgtctcccatatacgtaagcccgatcatccgttcgtaaaatcctctcgcagcttcaatagagctgacggcaatgccgacatgatcaagttttttcatagcgcggccacctgctttccgccataggatatggcttgttcatacaagcaaaacacgttaaaatgatagacagtaatcttaaggagtgaaacaatgtctcaaaaatttatgaaaagcgccgttatcgtcattttgggcgtatttatactttcaaccctcctctcaggcattatgatgtatttgcgttaaaaaagcaggcgcctcattgcaagggggtttcctgcttttttatgagggctttccgctctattgcaatgtcctcgaatgagcggttttcttttgtaatcaatactttcgttccgggagggataatccggaaaatacggatgacatcccggtttttcatacggatgcagccgtttgaaacaaaccccccgatcagctcttctctgtttgttccgtgaatgccgtatatcctgccgtcggtgcctttcgcgtcaaaaccgatccagcggacgccgagcgggttttccggcgcgcctccctctacatttttcttccggtaatacggattgacggctttgaccgttaccgtaaattctccttcaggcgtcaaatcatccgtttttcccgtcgccacctgataaatgccttctattcggttatccttcacaatagcaagcgcatttgtggctttattgacgataatataagggtcacccggcaaagggttcgcgccaagcggccaaagcggtgacagcagcagggcggctgacaataaaaaaaatcgcatgggctcccctccttttttcattagaatgaccaatgaaaggaggactcatgcgattgatccatatgttttttacagcttgatgcctttgaaataacttttaatcacgagatattgttccatctcaccgaggaggtggaacaaagccgcccgcgcttcaaactcctcgcgcgttgccgggagcggcatttcttcaaattccgttctcatttctgcaagtctttttaaaaatttatgagcggtattgccggggtgaatggcttcccttaattcatggatgaaatgggcgattgttttgccctgctccaccgttattgaaatagaggtaatcttcggcagtagccgttcaatgatttcaaattgtttctgtctcatcttaaaataatgatagtaaagattttcatggcgcaaaatatgattctgaacgtcccgataggcgaggtttttcgcctcttgaatcatctgatgcgtctccggtatttccttccccgaccaatcttgctcaccagttaacaaataccgttcgatttcggcgaagatgacggaaaagttgtcctcaatttttttccggtacgccgcgagttttctgtcgaggctcggcatatacagattcattaacagcgcgacgccgatacctacggtgatcagctggaactcattccagataaacgccatcgtaatgccgccggacatgtataaatgaagaatgattactgagctggtgacgatcccttcgtttatttttaaaacgactgtagtcggaatgaacagcaccagcaatattccgatcgcaaacggataatagccgatcagcccgaaaaagacatatgagaagacgatcgccaataaacaggcggcaaatcgggcccacgaggcctgaagcgaccgcttttgcgtaatctggatgcacaatatggtgatgattcctgcggatgcgaagttttgcagatgcaacagctgggctaaataaatggccagcgccgttccaagtgcggtctttagtgtgcggtaaccgattttaaacattgcttgctccattctgtttgtttctttctcaaaaaaaagaagaagagcattcttcttcttttcttacagatatattttataatattttttctaaaaagtcctgtgctctttttgacttcggagaaagaaaaaattcttccggctgcccgtcttccacgatcgtcccttcatccatgaataatacgcggtctgccacttctttggcaaatcccatttcgtgcgttacgatcaccatcgtcatgcccgtctgcgcgagctctttcatcacctcaagaacttctttcaccatttccgggtcaagagccgaggtcggttcatcaaacagcatgatgtcaggattcatggcaagcgcccgcgcgatggcgacccgctgcttctgtccgcctgacaaacggttcggatagtcgttctgtttgtcaagcagtccgactttttcaaggagggcgcacgccttttcctccgcctcgtttttagactctttcttcacgctgaccggcgcgtatgtgatattttcaagcaccgttttatgaggaaacaaatgaaaatgctgaaataccatgccgatattttcccgcactttcagtttattcgttttagctgcggtaatctcattttctttaatggcaatcgttccgccgctcggggtttccagcagatttaagcagcgcagaaacgttgatttgccggaaccggaagggccgatgacagcgacgacttccccttcttcgatctgtgttgaaatgtttttcagtacttcatgtttcccgaatgattttgacaggttgtcgaccttaatcattggctttcagcttcctttctacgccttttccgatgaatgctaagatcaaaacgagcacgtaatagattaagcccgccacaataagaggttctaaatagttgtatgttgcggcgccggactggtaggcccgtctcataatgtcgccaagaccgataactgtgacgatcgccgattctttcgttaaggtgattaattcgttaataatagccggagaaatgtttttaaacgcctgcggcagcagcagatctttcatcatttttccgtacggcacgccgagagcgacggcagcctctttttgtcctttgtcaattgcgttgattcccgctctgataatttcagagacgtaagcggctgaattgagcgataatgcggtgaccgccgcccaaaattgatcgatctgaaagccgaggagctgcggcataccaaaatagatgatcatcagctgcagcacgagcggtgtgccgcggaatatcgaagtataaaaatccgcaatccatttcagcggactgatcgtgctgattttaaataagctgagcacgatgcctaatacaagaccgatgaccgccgaaacgagcacaattttcaatgtgaccgcaaggccttccaatataaaaggaatttgggggattgttgctgagaaatccaaattcatacgtgtgatctcctttgtctttattcaagataaaaagctcaacgaaaagttgagctttcttttatttctcgttggtgaaccattttttcttcagtttttcgatttctccgtttttctccatttctttcagcgctttgttgaacttcgctgtcagatcactgtctttgcggaacgcaatcgcggagcccgattcgtctgatttcgcatctgctgacgcaaagccctgcagatcttgatttgaactgaaatagccttgtgctacgatgtcttcgataatcgcggcatcaaaacgcccggatttgatctcttcggttaagtctgagatccggttgcggtcttcgagctgaaaaccgtatttcgaagcgagcttcttgcctttttcctcttgaatggagccgagctgaacaccgacggttttgcctttcagatcattcagggatttcatgctgcttccctttttcgtaacgatcatattgttagcagtataataaatatcagaaaaatcaacttgctttttccgttccggcgtaggtgtcattccagataaaatcatatctacctgcttggacttcaaggctgtaatcaggctgttgaagtccatgtcctgcacctcaacgtcatagccggtctttttgcctagagcttttgccagatcaacgtcaaacccggtgatctgatcgccgtctttatattcaaatggtttatagtcagccgatgtacccataatcagcttgttctttccgccctctgagcctgaattgcctgatccgcaggcggacagcgcaaaggtgatacatgcggcagctaataccaacagccatttcttcatgattcatttcccccatatctactgatctcttaaatttgaatatttattcgttaacttgtattttaaacactttttaattgtgatgcaatactattttcgaaaaatatattttcctttctgtgtttattatagtcattgtttttcagattagtgacagctgaacgccgatgtatatatatttatatttatacagattccatataaaaaaaccccgcaagcgcttggctccggggtttttctttcacttatacttcttcacaatattcttcaaatgcttcctgcagttttgtgacgacggccatcggctcatggccttcaatttcatggcgttccaccattttcatgattttcccgtcttttaaaatggcaaatgacggagaggacggcggatagccttcaaagtattctctcgctttggctgtcgcttctttatcctgtccggcaaataccgtcacaagctgatccgggcgtttatcgtaatgtacggaatggtacgcggcaggccgtgcaataccgcctgcgcatccgcacacagagttgaccatgacgagtgtcgttccttttttcgaaagcgcttcgtccacttcctcagcggttttcagctctgtatacccggcggccgtgatttcctggcgggcttgacgcacgacatcattcataaataaattaaaatccatattcaattgggacctctcctttttgatcatctcttcttatgatagcaaggaacctccctatcggcaaatgacaccgctcatatccaattgttttttgtcccttttatgttcccgatgtaagtttatgaccctttaaaaacgggaaacttgttaaggagattgtctgaaataaaggagcagtcatatgagccaacggaaagcagttttaatttataacggaaacgccggtcaaaaacagattgataaaacgctcggcacggtcgtccccattttggcccagtcagctgatgaacttttgattaaaccgaccaaacatcaggatgatgcccgtcagtattgtgaaaatctcgacagttcagttgaccatttatatattttaggcggagacggcactgtgcatcaatgcatcaacagcatcagcaagcttgatcacagacccgctgtcggcattttgccgggaggaacgtgcaacgatttctcacgggcgctcggcatcccgcaaaaccttcaaaaggccgctgaagcgctcgcggccggacataaacggatgattgacgtctgtaaaacggatgacggctattttctgaacttctggggcatcggactgatcaccgaagcatcaagccatattaatgaaactgaaaaagcatggcttggtaaaatcagctacttcacgagcgccttgcggacgatgacaagcgcgaacccgtttcctgtcaaattgacgattgacggcgaggtgaaagaagacgaagccgtaatggtgcttgtcatgaacgggcattatatcgggacaaacagagttcccctgcctgatgccagcctccaggacggcttagccgatgtgttaatctgccgcaacacaagccttgctgcgctgcgggagctgatgacgatggagcagggttcgtttgatgatttcgaaggggagctgtcctatattcaggcctccagaattgaaatcgaaaccggacgtgagatggacgcggatacagatggtgaggtatacggaacaacaccttgtacgatcgaagtgaaaaaacatcatctcactatgattgttcccgaggattcacaatgaaaataaaaaagctccttttgccgcccaggcaaaaggagctttttttaatagacggaagtatgttcatcaatgttttctaagatctctttgacgcgtccgaggaatcggccgcacacgagcccgtcgagcactctgtgatctaaagacaggcaaagattaaccatatcacgaacggcgatcatcccgttattcatgacaaccggacgtttgacgatagattctacctgaagaatcgccgcctgcggatggttgataatgcccatagattgaactgagccgaaagatcccgtgttattgacggtaaatgtgccgccctgcatatcttccgcggtaagttttccgtttctcacttttttcgcaaggtctgttatttctctggctatgcctttaatcgttttttcatcagcatgcttaataaccggaacaaacagcgaatcttccgtggcaacggcaatggagatgttgatgtctttcttttggacgattttgtctcccgcccacatgctgttcatctgcgggaactctttgagagcctgcgccgccgcttttacaaagaaagcgaaaaacgttaaattgaagccttctttttgtttaaatgagtctttaatgctgtttctgtacgccgtcatgttcgtgacgtcgacttccatcatcgtccaggcatgcggaatttctgttttgcttttatgcatattggcggcgatggcttttctgacgcctgtaaccggaatttcaatatcaccggctgacagagcgggtgccggtgcttgtttttgctgttgtttcggcgcttgttgcgttgtttgaacggcagccggcgccggtgcttccgacttctgcttcattcccgaatcaatgatcttttgaatatcttttcgcgtaattcttccgcctgcacccgttccttcaactttttcaagctgaatgccgtgttctcccgctaatctgagcacggccggcgaataacgcgctttatttgactgatctttaccttgacggtttgcatcagtgtctgaagggctattctgctcttcttcccgcttcggcgcctcttcggcttccgtttcttctgtttcaattttgcagatgatctcgccgactgcaagagtctggccttcttctcctacaagttctgtaatcgtaccggtaaaagaagacggcacctccgcgttcactttatccgtcatgacctccgcgatggggtcatatttattcacttgatcaccgggggataccagccacttgctgatcgtcccttccgtcacgctctctccgagctgaggcatagccatttgttcaatcgccatgtcaaaaacctccttacgtctttaaaactccgctaattctctcatcgcggcttctgctttgtcaggattcatcatgaagtatttttccattgtcggcgcataaggcattgccggaacgtcaggacctgcaagccgcttgatcggcgcgtctaaatcaaataagcagttttcagaaataatggcggcgacctcgctcataataccgccttctttcgtatcttctgtgatcagcaatacttttcccgttttagacgcggcttcaatgatggcttctttatctaacggataaaccgtacgcaagtctaatacgtgtgcggaaattccatctttttcaaggcgctcggcagcctgcagagcaaaatggacgcataatccgtacgtaataacagtaatgtcgctgccttcgcgttttacatccgcctttccgatcggaaggacgtaatcatccgcagggacttcgcctttaatcagacggtacgctctcttatgttcgaaaaacagcaccggatcttcgtcacggactgcagctttcaacagcccttttgcgtcataaggagttgaaggcatgacaattttaaggcccggctggttggcaaaaatggcctccacagattgggaatgatacaacgcgccgtgcacaccgccgccgtaaggcgctctgatgaccatcggacagctccaatcattgtttgaacggtagcgtatttttgccgcttctgaaatgatttggttgaccgcaggcagaatgaaatcggcaaactgcatctcggcaatcgggcgcatgccgtacatcgcggcgccgatgccgacaccggcaatcgctgattcagcaagcggcgtatccatcacccgctcttctccgaactgttcatagagacccgccgtggctttaaacacgccgccttttctcccgacgtcttccccgagaacaaacacgcgcggatctctttccatttcttctttcattgctgcattaatactgtcaatataagacattacagacataagtattcctccctacttcgcataaacgtgatcaagcgttgattcaggagatgcgtatggcgctttctccgcttcgtctgtcgcttcgtttacgatagccatgatgtcatccagcatggtcttttcttcttcttcacctagaagcccggcttcttgcaagtatgctttgtataaaagaagcggatcttgtttctttgcttcttctacttcttcgcgttctctgtagctgctgtcgtcgtcatcactggaatgcggcgtcaaacggtaggaaaccgtttctattaatgtagggccgtcgcctttagacgcccgttcgcgcgcttcttttacggcccggtaaacttccagcaggtcgtttccgtcaacagtgactcccggcatgccgtagcctgccgcccggtcggatattttctcgcacgccacctgtctgtcatacgggacagaaatggcatacttattgttttcacacatgaaaatgaccggcagtttatacacggcggcaaagtttgccccttcgtgaaaatccccctggttggaagatccttctccaaaggtaacgaaagagacgatatcctttttatccatgcgtcccgcaagcgcgattccgactgcgtgaggcacctgcgtcgtaacaggggatgagcccgttacgattctgttttccttttgcccgaagtggcccggcatctgccttccgcctgagttcgggtcagctgctttcgcaaaacccgacatcatcaaatcctttgcagtcataccgaatgcaagcacaacccctatatctctgtagtacggaagcacatagtcggtatcacggtttaaggcataggccgcgcctacttgcgccgcttcctgtccttgacatgaaacaacgaacggaattttgcccgagcggtttaagagccacattctttcgtcgatttttctggctaacagcatggttctatacatttcaacggcttcttcgtcagagagccctaatgcttgatggcggtttgtagtcattcaaacccctccttctttccttttaaaaatgaatcgcgtttccgtctgcggctaacgcagcttctccaatcgcttctgacagcgacggatgcggatgtatggactggccgatttcccaaggcgtcgcgtcgagcaccttggcaagccccgcttcagagatcatatcggtgacgtgcggaccgatcatatgaacaccgagaatatcatctgtattccgatcagcgacgattttgacaaagccgtcgctttctccgtatacaagagcctttccgatcgccatgaacggaaacttcccgatcttcagttcatgcccttttcgaagagcttcctcttctgtcagaccgacgctcgccgcttccggatttgaataaatacatttcggcacaagagcggcatcaagcggagccggattaagacccgccatatgctcaacggcaatgatgccctcacgggaggccacatgcgcaagctgcagcccgccgacaacatcaccgatcgcataaatgtgcgattccttcgtctgcccggcttcgttcacgatgatagaaccgttttccgcttcaatatccgtgttttcaagtccgatcccttcaatgttcggctggcggccgatggaaacaagcatttgttccgcgtgatacgtttctttttttccattcatttcagcggcaattgaaacgccgtccgctttttccaatgtatccggaagcactttcgcacccgtcacgatcttaattccttttttcgttaacagtttttccatctcgcttgaaatatcacggtcttccgtcggcaaaatgcgatccgcatattcaatcacagtgatattgacgccgaaatcgttcagcatggatgcccattcaattccgatgacaccgccgccgacgatcatcatggattggggcagacgttcaagctctaacgcttcatctgatgtcagaatatatgtaccgtctgcttctaaacccggcagcattttcggccttgaaccggttgcgataatcaattgtttcggtatcagcatgtcgttttcttcaccatttgcgtattcgacggaaaccgtaccgggaagaggtgagaagatggaagggccgagcatacgtccgtacccgttgaatacatcaatcttcccctttttcatcaagtgggcgacaccgccggccagccggtcaacgattccctgctttcgtttttgcacgctgtcaaagcggagggagacaccttccgtttcaatgccgaatgctgccgcttcctttgcggttcggtacacttccgcgcttcttaacagcgctttactcgggatacatcctttatgcaggcatgttccgccgagcttttctttttctacaacggccgtttttaagccgagctgggccgctctgatggcggctacataaccgcccgtgccgccgcccagaatgaccacatcatactcagtcgccatttgttttcactccttcgccgatctgatattgctttgactgctcctcaccggctaaaacccgaagcgcgccttgcgcgagagattgcagttcattttctcccgggtacaccagtacatccgaaatccaatctatgtacgatctgatggcggatacgaaacttttcccgtacgccaatccgcccgtcaggacgataatgtctacttttccttttaaaacggcgcttgccgccccgatttcttttgctacttgataagccattgcgtcataaatgagacgcgcgttttcatctccggcctgaatgcgtttttccaccttcaccgcgtccgttgtccccaggtagccggagagtccgcccgtgccgacaagttttttcatcatatcggcttttgaatacttgccggaaaaacacatttctaccaaatcacccgctggaacagttcccgcgcgctccgggctgaagggtccttctccgtgaagcccgttgttgacatccgtcacccgtccgcaatcatggacaccgactgtggtgccgccgcccatatgagtgacgatcatcttcatctgttcataccgtttgcccagggacgccgccgcctgacgggcaacagctttttggttcaaagcatggaaaatgcttttccgcttgatttcaggcattcctgatactttggcgagcggagtcatctcatccaccacgaccggatcgacgatatacgcggggatatttaatccgtcagctatttccctggcaataattccgcccagattagaagcatgctggccgttgtagccgtttttcaaatcaatgatcatggcgtcattcacttcatatgtgccgccctcaatcggtctgagcaggccgcctctggcacaaacggcatcgaactttgaaatgttgatgccctgttcgtgcaaagactcaagaatgcttatttttcgaaattcgtattggtcgatgatgctgttaaatgttttcagctcttcttcgggatgccgcagcgtcttttcaaagatacagcgttcattgtgaaagacaccgattttcgttgatgttgagcctggattcagaatgagaatgcgtttttccttttcgaacattttcatacctccagatcaaattcctatcgtctgcttaatatactttggccgttttgcagaaactggcttcttgaacggcgcatgcgctcaattcgttcctcagccagacggtcagccgctaagtatgtcggaatgccgtcacgcgcggaaatatcgagcacccgctcaatgtttgcataaatgccttcaacctttttcaaagcccgctcagcattgtagccgtaaagctcatcggccacattgatgacgccgcctgcattgatgacataatccggagcgtacacgattcccatttcatgaatggtatcgccgtgacgtgtttctttcagctggttattggccgctcccgcaatgactttcgccttcagctgtttaatcgtgtcatcgttaatgacggcgccgagagcacatggggcataaatatcgcacgcctgtgagtaaatgtcgccaggatcaactgcgcgggcgccgaagtcctcaacggcacgtttaacagattctttattgatatccgttacgattaaagaagcgccttcttcgtgaaggtggcggcatagattgtaagccacatttcccacgccttgcacggcaattgttttaccttccagtgaatcagtgccaaacgccgctttcgctgcggctttcatccctttgtagacgccgtacgccgtaaccggggacggatttcctgatgaaccgaatgccggagaaattccggttacatagtctgtttcatcatgaatgatgtccatatcttcaacggtggtgccgacgtcttccgccgtaatataccttccgtttaagccttggatgtaccggccgaacgcgcggaacatttcttcatttttatctttgcgcgggtctccgataataacggttttcccgccgcctaagtttaaaccggcagccgcatttttataagtcatgccttttgcgagtcttagtgcatcttcaatcgccgcttcttcactgtcatatgtccacattcttgttccgccgagtgcggggccgagcgtcgtatcatgaatcgcgatgatcgcttttaatccggattgttcatcttggcagaataccaattgttcgtaatcataagtctccatatatttaaaaatttccattggttcgttcctcctactgttcttgtgatgcgcaaatcgcaagcgcaattgaatacagtttattttctgcggtatccgctctgctcgttaatgcgatcggcgcttttgcaccggcgatgacggcagcaacacttgctttcgcaaaataaatcattgacttataaagcatatttccggcctcgattgaaggaaccaagagaatatccgcctggcccgctacgcttccggaaattcctttttgcagcgcagccgcttgggatacggcattatccaaagcaagcggtccgtccgcaatgcagccggtaatctgtcctctattgcacatctggacgatcgcagccgcgttcagcgttgcctccattttcggattaaccgtttcaatagcggcaaggactgcggctttcggcataggattccctactgaatgtgcgacatgaaccgcattttgcagaatatgcccgagctcttcaagagacggggcaatgttcagcgctgaatcagtcacatacatcagccggtcatagtccggcacctcaaaaacagctacatgtgataacaccctttttgaacgaagcccttcatggcggtttaaaaccgatttcagaagagtagagctcgggagattccctttcattaaaacgtccgcctcttgttcacgcactgcgcgcactgcttttgccgcagattcttcgggtgaatcggcgtggatgatttcagcattgaacttcggctcatttgccagaagctctttcagctttccgctgtcacccgtcagtaaaaatcgtgccgacaagtgttctgccgccattttgacggcctggatcacttctttatctgctgcgtgggccactgcaatggtttttgcgttttttgccgcggctttttcaactaggtctctcagcttcattttttaccaccttccttgtgcgaatccgcttttaacaatgcaagttccgtgccaaatatgcgggagggtttattccggctttcttcaagaaaacatgcagctgtttgcgctttctctgcaatttattgcatgccgtcatttgcaaggccgtacttatccattttgtagtacagattccgaatactgacaccaagcgcttttgccgttttggttcggttgaatttatgcttttcaagcgttttttgaatgacgtgcgcttcaaatttttcaacagcctgagacagcttttccccttccacatccggaaaatcactttgggtgccgtttttttcattcagctctgattcaaaaacaggcaggtgctgctgttcgatccgttccatgtgcggctctaaaaatatcattgcccgtccgagaacattttcaagctcccggacgtttcccggccagctgtaggctgataaagctcgcaacgcgttcggcgtgagcccctttacattgcggccgtaatcctgattgattttttcaatgagccgaatgctcagcgcttcaatatcttctttgcgctgccgaagcggcgggattgagatcggatagcggttaatccggtaatacaggtcttcacggaacgcgccttccgccatggccttttcgatgttgacgtttgtcgctgcgataattctgacattgacagaaatcgctttagcgccgccgactctgataatttctttttcctgcagaactctgagcagctttgcctgggtgctttgtgtcagctctccgatttcatctaagaaaatgctgccgttattcgcttcctcaaaaagtccttttttgcccccgcgcctcgcgcccgtaaacgcgccttcctcatagccgaaaagctcggattctagcagggattcagacagggccgcacaattgacccggatgaacttattgtattttcggtcgctttcattatggatggcgtgggcgaaaagttcttttcctgtgccggattctccccgcagcagaatcgtcgccggcgttttcgccccgagcttcgcctgttcaagggcgaccagcatttgttcactcgtgccgataatgtcgtcaaacgtgtatttcgcttcaagcgtgcggatgatctggcgcgcccgattcagctcagcagtcagcgttttaatttctgacacgtcgtggatgacgccgacgctgccttttaaaataccgtccacaataacgggggcaacatttacgataacatcctttttattggggccgaccttcattctcacaccccgcacgggccgccttgtccccaatactttcaggtgcatgctctccccttctgagatatcggtggaagcgggttttccgatgacttcgctttctgacagcccggtcatttttgtatacgctttgttgattaacattccgatgccgttttcatcaacgacagaaatggcctcgtctgatgattgtataatcgcttcaagcatggtgcggatttgttttaagttcgtgacctcttccgccagttcaactgcgtcggtgatgtctttaaacacgcataacgcgccgagaagttttccgccttcatcaatgatcggcagtcttgtcgtgacaatctgcaggtgctttccgagaagctgcttctggttatattccggctctctcgtttccagaatccgcggcagctttgtgttcggcactacatctttaatttggcggccgatgacatcctcccgtttttggccgaccattttttctgccatctgattaaataaaatgatcgtttcgttgacgtctataaaaatcatgccgtcgtgcgttgaattaaaaatccggtcatgcttatacgtctgcgacttcagcatttggataagctgctgtttttcctccatcagctgaaacaccatgtacgccaattttcccggcatgacgatggtttgttcttttttctcatggagcagctcatccatgaccgctttatcgcctgttgtatggatgataatatctatatcttcagttatgtagggtttccaatctgatgaggttgcaattccatatctccgggcttcttgcagcccttgcgcctccggatcttgatcaaccaccgcaataatccggatcagctttgttttcatcaaaatctgtaggagcgccgtgcctcctttaccagcacctataatcagcaccttctgcatcccgatacccctttatatgaaaaaatttgcacacctgtatttcccgttgcaataatttgcacaacccctatgttaccacgttttgatctcttgacaaaatattttttcgattggacaataaaggaaaacaaatcgtaaaggggttttctgaatatgagccggcttgttgcgcttttgattctggtcctccccggcgctgtcgcggcgctcggcattaagctgatgagagatgcattattcgggcatgcgttttccccgtttccgtccctttttcttcagggggcggccggattggcgttttttttgttcggcctttatgttctggccgggtttattctgtacagagatcgaaaacgcaatcaagtcagcccgcggttcaggaaaaaaaagctgtaaaaaaagcccttgcaaaaaaagggctttttcagtcgtccggcagtatcgttttggcaatggattgatccagttcttcatagtcatcgtaagcgatcgtttcatatagttcttttctcgtctgcatatccgaaagcccctctttttgcgagccttcttctttcagaaggcggaaaatacgctcaaaagccttggccgccgttctgagtgacgtgaccgggtaaatgaccatctgacagcccatatcggaaaattcatcagcactgtaatacggcgtttttccgaattcagtcatgtttgcgagaatcggcacactgatttgtttggaaaacgctctgaattcactttcggattggagcgcttccggaaaaacagcgtcagcacccgattttatataagcggacgccctttttaatgccccctccaatccttcctgctgtctggcgtctgttctcgcaacaacaagaagagtcggcgcggcccgcttgaccgcttggattttttgcgccatttcttcaatcggcacgagctgcttcccattcagatgtccgcattttttcggcaggcgctgatcctccatctggacggcggccgcgcgcgcttcatacatttctttcgccgtccgggcggcattcagcacgcctccgaaacccgtgtcaatatcgacaaggacgggcagatcagacgagcggaccagatctttaacccgttcagccatttccgccgacgtgatgatccctaaatcgggaagccctctgctcgccgtgtaagccgcgcctgataaataaagagccgaaaaccccgttttcttggcgataagagcggccatggcatcgtgagcgccgggaatctgcaatagatccggcgctgccatcagcgtacggaaccgctctgcaagctcctcttgagacgactgcttgctgacgatccacgtcatgtttgtcaccctcctattttatacgagaaataagtccataaattcattaacgctgagcttctgcattcggccgctatctttacagacctcttcgattttccgctgctgcttcaatgaaaaatgagtgctgatgtttgctgaaaacttggcaagaatcttcggaacggcttcttttctgcggaatcggtgcccgagcggatattcacattcaatccgtcccgtagccgtgccgtctgtaaaatgcacctgtacggcatttgagatggatcgcttattcgggtctaagtaatcttttgagtacgctttgtgttccgtcacctccattttgctccgcaatgtatcaattcgcgggtcagacgccgtttcctcttcataatgatccgccgtgatatctccgaaaagcagcccgattgccgtaatatactggaggcagtgatcccggtcagccggattgtgaagcggcccttttttatcgataatccggattgccgactcatgggtcataatcgtgatcctgtcaatgtcttcgatgcggtctttcacctccggatgaagccggaccgcgcattccgccgctgtctgggcgtggaattcagccgggtaggatactttaaacaaaacattctccatcacataggaccgaagcgggcgggcaagcttcatttcctgccggttaaataatacgtcttgaaatccccacccagatgcggtcagagccgtcgggtaccccatttcacctttgtgtgccataagggccaaatatacccctctgctcgtcgcgtcgccggccgcccatgatttgcgtgatccggtattcggcgcatgacggtacgttctgaggcttgaattatcaatccaggcatgagatacggcgttattgatttcctcttttgagccgcccagcatttgcgcgcaaacagccgcagtcgccactttcacaaacagcacatggtcaagccccactctgtttaagctgttttccaaagcgagaattccttgaatttcgtgcgctttgatcattgcgcaaagcacatcgcgcacggtaagcggttctttcccttctgaaatccgcactctggatatataatccgcacaagccaatatgcctccgagattgtcagacggatgaccccattccgccgcaagccacgtatcattataatcgagccacctgttgatacagccgatattaaaagcagccgtgaccgggtctaaaacaaaaggcgtgcccgggactctgctgccgttggggacggaggttcccgggacaatcgggccgagcagctttgtacattcgggatagctgagcgccaaaattccgcagcctatcgtatcaagaagcacatgtcctgccgtagtaaaagcttctgaactgtcaatctcctgatggagcacgtagtcagaaatctcttcgattacagcgtccattcggcggggttctgtcatgttttcatcttcctttctcatctgtttacaggcgcgctccggtataacggacacgcgggcggaaaagccggtttcggctgtgctgttcaatgacgtgggcgcacaatccgaccgtccgtgcgctgaagaatataggcgtatacagcggtatcgggatgccgagcatgtaatagaccggcgctgcgtagtaatctaagttcggataaaggccttttttctccctcataacggtttcgccggcttcacacatatgataaagacggaaatcacctgaaagatcagacagcttttttaacgcttctttcatcatgagcgccctcgggtccatttttttcatgtagacacggtggccgaagcccatgattttttctttgtttgcgagtttttgagttaataattgtataaacccgtctgtatccttcgcttcctcaagcatgtacataaccgcttcgttcgctccgccgtgaagatttcccttaagcgaggcgacggctccggtcagcgcgccgtaaatatccgattgcgtcgaagcgatgacacgggccgtaaacgttgagttcggcaattcatgctcactgtataaaagaagcgaccggtcgaagatttcttcttccaaagatgacggcgtttttccggtaatcatatataaaaagtttgcgctgtatgataaggttccgaccggcgccaaaggctccagcccgttgatgactcgatagctgttgaccgtcagattcggcattttgcctatcagtccgcgtacgcggtgctgatttacggaagatgagcggtcatcgatgtccttgtcaaagcctccaagcgcggacaaacccgtcctcagtccgtccatcgggtgagtatgttcgggcagcagacggcatatgtgcaagatttcctcgggaaggtgtccgacgcgccgaacgtcttcttcaagcgccgccttctctttcgcatcaggaagtctgtcttccaataagagatgaacaatgtccatatagccggccgttttagaaagctcaatcagatcgtggcctttgattaaaatactgccctgctgtgtatccagaaaagaaatccccgtttccaccgcaatgacgccatctaaaccgggagaataagattccatggtttcgctcctttgcgcactttttattgaagaagatacttagaaataatcagcctttgaatctcattggttccttcatagatttgcgtgactttcgcatcccgaaataaacgctccgcgggatactctttcatatagccgtagccgccgtgaatctgcacagcctccaccgccgctttcatcgccgcatcggacgcgaattgcttcgccatagatgcttcttttccgcacggaagccctcgctgatacagatcagcagcatgatagaccaataatttggcagcttccgcattcgtcgccatgtcagataatttaaatgaaacggcctgattcgaagcgatgggtctgccgaactggctgcgggttttggcgtactccaccgagcagccgagcgccgcttcgataatcccgagcgcctgagccgctatgccgatccgtccgacgtcaaggtttttcatggcgattgaaaagccttcaccctcttcgccgagccggttttcaaccggaatctccgcttggtcaaactgcaattcgacagtattggaacctaacagtccgagctttttttctttttttccgacagaaaaaccgggtgtgtttttttcaacgataaacgctgaaattccctttctccctttacccggatcggttatggcgaatgtcagatacagatctgccgctccgccgtttgtaataaagatttttgaaccgttcagaatatatgaaacgccttttcgcacggctgttgttttcaggctgcccgcatcagatccggattgaggttcagtaagcgcaaaagccccaatatattcgcccgctgccagcttcggaatatacgtttgtttttggacttctgtcccaaaatgcaaaatcgggattgtccctaccgatgtgtggacggacaaaatgacgccgacggccgcgctgacttttgatatttcatgaatcgctaaaatgtaagatgttgtatcagcacccgccccgccgtaagcttccgggacgggaatgcccatcaatcccgcttcgcccatttttttaatcagccgctccggaaattcatctgttgattccatgagctcaaccaccggcgcgatttccttgcgggcaaaatcacgcaccatttttctcatcatgatgtgctcttctgtaaaatgcatggctgccgtctccccccatgatctttacgtcatctgccgtactcataaaaaccgcgcccgctttttttgccgagccagccggcgctgacatattttctgagcagagggcatgggcggtatttcgaatctccgagccccgcatagagaacctccataatggaaaggcacgtatccagcccgatgaagtcagctaatgttaaaggccccatcggatgccgcatgccgagcttcatcacctcatcaatcgcttcctttgaagctgctccttcgtaaaggcaataaacggcttcgttaatcatcggcattaatatgcgattagatataaagcccgggaagtcattgacttcgacaggggttttattcatccggacagcaagcttctttactgtttccgccgtttcttccgatgtggcgagtcctctgatgacttcgacaagctccatgacaggaaccggattcataaaatgcatgccgattactttttcaggcctttttgtggccgcggcaagctccgtaatgggaagagaagacgtattgcttgccaatacggcatgagggggacagattttatctagtgtgtcaaacaattctgcttttgcttttttgttttcggcaatggcttcaattacaaaatcagcatctcccgcttctgtgagctctgccggggaaatacggctgaaaacggcatctgtctcctgctgtgtcttccgtccttttgcctgctctttctccaggtttgtctttatgcggtgaagaccttttgttaccgtttccggctcccaatcgtataacttgacggcaaacccggcttctgcagccgtctgcgcgatgcctgctcccatctgaccggcacctgcgaccatgattgttttcatcttcatccggcgctccctcctttaatcagtacacctcaagcaaaacggcatctccttgagccgctccgctgcatatagcagctatgcctaaacctcctccgcgacgctttaattcgtatattaaactcatgatgattctcgctccgcttgcgccgatcgggtggccgaacgcaatcgcccctccgtttacattcactttttcccggctgaacccggctattttttcactcacgagcacgacggacgcaaatgcttcatttacttcaaacaaatcaatatcgtcaacggacagtccggtttttgtcaagagccggctgatggcctctcccggcgcgcttgccagctcgcacgcttccaatccgactgacgcaaagccaagtatcgctgcgagcggcctgacatgctgcttcgcggctttttcctctgacatcagcacaaatgctccggccccgtcatttacaccgggagcgtttccggctgtaaccgttccgtcggctgtaaaaattggcttgagcgctgcaagctgctcaaggctcgtatcagggcgcagcccctcatccgcttcaacggtatgctgtttgccctttttgccggtccaggtgacggggacaatttcttcacgcaatttgcccgcctcggccgcctcagccgcgcgtttctgactcaaaagagcgtaatgatcctgttcatcccgggaaatgccgtactttttggccgcagtgcttccgtggacagccatatgcacctggtcgaacgcacaggtcagcccgtcatgaaccattaaatcctgaaacaccccgtcccccatcctcacaccccagcggccggccggaatggcgtacggaatgttgctcatgctttccattccgcctgcaatcagcacgtccgcatctttcgcccggatcatttgatcacagatggtaacggccctgagccccgatgcacagaccttattaatggtttcagccggaacggaccacggaagcccggcataccttgcagcctgccgtgccggaatctgcccggcacccgcctggacgaccattcccatcaccgctccttccgcttcgctttcactgatagcggcgcgcttgattgcttcttttatggcaatgccgccaagctcggctgcctttacctcttttaatgcgccgccaaattttccgaacggcgttcttgccgcactgacgataaccgtttttcccacaattttgcctcactttcaataagataaaagataacgcttacacaaaacgccctgttacaatatatgaaccggctgaccgagttatgagtgcaccgcctttttccagcccataaaaaaagaagactgtctgaacagtcttctcagctgcggcattctttttttatagaaacggccagctttggataatcggtaaaaattgcgtctgctcccgctttcatcagctgcttcatatcctcaggacgattgacggtgaacggacggagcgccgcttggtgttttgcaagatgtttgatcacttcagcgctcaccgccggcgtaccgagcttcggatgataacctgaagcgggaatggcggcaagataccgttcaggccggtacagcacatccattgtcagcaccgcccgttcaatttcaggcgccaaagcgtggcaaaccgcgagactctcatgattaaatgaagaaaaaataacgcgcttttccagtccgtaatatctgacttttttaatcacttcttcttccattccttcgtaacggaatacactgtttttcagctcaatgtttatcagaaaatcagcacgttccgcaaaacgcagcacatctgacaaaagcggaattctgacacctttaaaagcatctttccattttccggcggcatcggcggttctgattttgtcatacgccgtatctttcacaaatcctttcaaagacgtcgtgcggtcgagggtttcatcgtgaatgaccacgatccggccgtcttttgtcatctgtacatcaagttcgattccgtcagccccgtcctcaatcgcttttttgaatgcgggcatcgtattttcagggcagtcgcccgacgccccccggtgggcaaaaatattcgtcatatgtgtcacctcaggtgtttgtcatcggttttctctattataatcgttatgcacataaggagggtgctatttacacatattttataattaccgtccgctgtaataggtttcgattccgtttacaacggcgtccgcggcgtgctcttgtccgttatcgcttttcagcttgtccgcatcttgaggatttgtgataaaacctaattcagccagcacactcggcatctttgaatatgtaatgacataaaaaggagcttcttttacgcctctgtccctcatccctaaagacgtgacaagctgctgctggatgtcggaagcaagcctttcgctgtctgctccttcatatgtcgaattaaaatacgtttccgtgcccgatgccgttgatacggctgaattcgtatggaggctgacgaataaatcggattggctggcgcttgctttcgccacccgctcgtccaaacgtaaaaaagtatcgtcagtccttgaagcaactggtttcgcgccttctgtctccaatttggcgatcaccttgtttgacaccgctaaattgatgtttttctcaagcagtccatttccgccggccccgctgtcttctccgccatgtccggcatcgatataaatggttttcccttgcaaaggttcagctgcataagcagacggcgcaagcagaagaagagcggcacctaaggcagcagcgctttttgtcagtaaacccacgtttttttcctccccgttttcacatatctgtttcttttttcagttcctcaagccgtaattgtccgttgctctcttttttataggtgatttgcaccgccgtatgttcaggcagagactgacattcaaaccgcttagcgaaaggcaccttcacctcttgcctttctccgtcaatttcgaccgcgatcgtatcgtttccggccgcttttataaatgttccttcctgagtaaatgacggcgccgcatcagcctccgcggtatactcgcagcctgataacagccatgcggtgaagatcagaagtatgacagacttcacacagatcacctcacgttttctcattcggctttatcttttaacagaatggccgatttgtaaagggagcctccattcctccagcgcttttccatatttggaatgaaggctatctgacctgctgtttacctgaacttagaaagaaaacaagctgatcagtctatgaaaaaggttctgtctgaaggctgaatatgcagaatttaacggaaacggacgactttctgttcattttgaaaaaatatcagatcggcaaaaaaagagagccgcgtcatgcgctctcccgaatagaaacattcatatttattttgagcttttcataaaatgaacgggacaacttaaaagagcagcgtattggcggcaatgatgagaataatcactccgctcagcaccgtgctgaactgtccgacgtgaaaagaaccgatgcgcaatgacgcggctttttttccaagcgagcagccgatccatatggtcaaaaagcttccgaccgccgcagtgatggaaatggcagcgggagaaagcccgatcaaccccgcgcttaatccgttggtcagcgcatttgcggatacggccaccccgagaaccatggattccaatataccgatttctcccgaaccgtcggcatccgctgcctccggattttgcagcagaccggcaaaacggccttttttttctgacgcgccaacacgcgctgtttttctcggcacagccagcagaatgatgcggataccgatgacagataaaataaacgccgccagcaatacaggaagaaagcccggtaaaacggctgaaatccatttgccgaaataaattccgatataactgaatacaaaacagataaaagcgatcatcatatttgacgcatgcgatattttgatttttctgatgccgtatgacatccccactcctaaattatcaatgctcgaggacactgccaaacctaaaatcaataaccaagccatgttcgtttctctccattctttgatgtcttttcaacatgttgtgccgttgaatctacactatcctattcagcagcacagaaaaggtaccttttctgcaaaaattattgattaatgatcatcattccggcggaaacgaggtgacacccttgacagaaaataaaaatacgacactggggccccttttaaaatcactgcttgataagcactcgctctccatgagaaaactcggcgccttaacaaacattgatacggccaccatctcccggattataaacggcaagcagaaggccaatttaaagcatcttcaggaattttcaaaacatctccgcaccccgctggaggaattgcttgaggcgtcaggcatagacatcggccatgaaaaagaagctgcgccgcaagacccgatgcacgcgattcaggatatgctgaatatggccgagatgtttgatcagcctttttcccgggagcaaattgagcgcgaactgaccagatatgaacaatatgccaaaacccagcagggccatcgcctgatttgcgatgagtttcaaaagaaaatggacaatgaagaaagcgtcggcccttttattgatcatttgaaaaacatgcatcatcagtatatggatgaatcaacaccggctgaagaccgcgcgattctcgggagcgcgctgctgtattatattttagcgaccgacgtcattccggattacatgtttccgatcggctacctggatgacgccatcgccgttcaaatcgctttgaaccggctgaaaaaaaagtaaaggcgcttaaaaaagcgccctttttgtgttgaaaaatatgaaacaccgcattacggttttgtcaaaacagagacagctgtcatatgatacatcaacctaacaaaaaggagggtgtcttctatggacagcaacacagttgtggcagtgtgcgctctgttaagtgttgtgattcagatcggaacgatattcgccgcaggaaagtggaaaaaagaataaacaaattgacggttttttcgcacaagcgtatgcttataaataaccttgtaaaagataagaaagaagatatgtatatgaaaaaaatcattctcctcttcgccgccgctgtcatattcagctcgatcggccatcaaatttcaggaggatataaagatcctgaaaaggaacggagaaaaccgtttcattcgtttaaatggttcagccggtcataacctcaagaagaagaacaagcaaaataattgcacacaattaaaacataagctagaatacggacgagttaaactcctaaggaagaaggcgaaatgatgaagcaaacttataaaccgctgtttgaaccttttacgttcgaaagcggcgtcactataccaaaccgtatttcagtcgcaccgatgacacactattcatcaaatgatgacggaacgatttccgaccgtgaattaaactacattactccccgttcaaaagaaatgggcatggtcattacggcatgtgcaaacgtaacgccggacggcaaagcgtttccaggccagcccggcatctatgatgattctcacattcccggcttgaaaaaactcgctcaggcgatccagtctcaaggagcgaaagccgttgtgcagattcaccacggaggattggaatgccctcctgaactcgtgccaaacaacgacgtcgtcagcccgagcggctcacaagaagacgggagacaaacgtcccgggctctcaccgaacaagaaattgagcacatcgtgaaagcattcggcgaagcgacacgcagagcgattgaagccggctttgacggtgttgaaattcacggggcaaacgggtacctgattcaccaattttattcaccgaaaacaaaccggcgcacagaccgctggggcggaagcgatgaaaagcgccttgcgttcccgcttgcagtcgttgacgctgtcaaacaggcaattgatacacacgctgaaaatccattcgttctcggctaccgcctgtcaccggaagagccggaaacaccggggcttacaatgaaagaaacattcatgctcgccgacgcgcttgcagaagagaacttggattatctgcatatttcactgatggatgtcaattccaaagcccgccgcggggcggatacttcacggacgcggatggatttattaaacgaacgcgtcggccataaagtgccgctgatggccgtcggttccatctataccgcggacgaagcgcttgctgtattagaaagcggaattccgctggtggctctgggacgtgtcattttgattaaccccgaatgggcggtgctggtcaaagaaggccgcgaacaggaaatcgaaaaagccattcaagcatctgaaattgagaaataccgacttcctgaaccgttatgggaaatgattcagaatacaggcggctgggtgccgtttgaaaagtagactaaaaaactgccggatgtccggcagtttttttgattcacaagtttttaccgctttgtttactcctatttctaacacacagcgtacatatagtaaatagattaatagaaaggagaccgtatatgatgggtggttttcctattacgattaatagtctttccggaaacggggttgtcaatgtcggcggtgcgttttcgataagtcctttaaccgtatcaaaaaccgtctacggctcaggtgggggaaatacggggatggtcctgcaaatgaatcaatccagcacatctcaatcttcaagctcacaatactctgatcaaaatgtaacgaaaacattatgacatccgtatttccctccctttccggctggcagcagccggattctttttgccgttttgtttaatcttattccatatcacagcgtacatatagttagtagactgtgagagaaaggagaaaaaatagaatgagcggttgcccgattacgataaacaacgtatcaggaaacggagttgtcaatgttggcggcgccatatccatcagtccgctgactgcatcaaaaactgttttcggtgccggagggggaaatatcggcattgtcattcaaaacaatgctgtaagccagtccaaaatgtttgaacatcaattttcagatcagaatattgtaaagtcaatttaagggctgccaagcagccctaactgcataaataaagcaggcacactgatttcccgaaaacttgattttaaacatcagcgatcacctttccatgttttgaatgatttcagttaaagatgaatagaatgcagattgaaagcatgagtactgaatctcattaaggaaagaaggaatcgtgatgaaaaaactttgccgggaagtttggattgaagttgaccttgatgcgataaaaaagaacgtacgggcgatccgccgccatattccgaatacgtctaaaattatggccgtcgtaaaagcgaacgcttatggccacggctctgtggaagtagcgcggcaggcactggaaagcggagcgagcgagctcgctgtcgccagcgtcgaagagggaattgtgttacggagagcgggaattacggcacctattcttgtgctcggcttcacagctctcagctgtgtgaaaaaatctgccgtttggaacataacattatcagcgtttcaggtcagctggatcaaaaaagcgaatcggatattggaaaaagaagcagattcgaaacggctgtccattcatatcaatgtggatacgggaatgggccggctgggtgtgcgtacggaagaagatcttttagcagtggtgaaagcgctcaagtcgagtacatatctgtcatgggatggcatctttacacatttttcaacagcggatgaaccggacactgagctgacgatgctgcagcacgaaaagtttatcagctttctccgctttttaaaaaatcaagacattacgctgcctaccgtgcatatgtgcaatacagccgccgctatcgcattcccggaattcagtgccgacatgatccgtttaggcattgggttatatggtttatatccgtccgcctcgataaaggaactgaacctcgtggatctcacacccgcactaagtttaaaggcgcgtatcgcttatgtgaaagccatggtgacagagccccggaccgtcagttatggtgccacatatatcgccgaaccgggtgaaatcatcgcgacgattccaatcggctatggtgacggttactcccgcgccctgtccaaccgcgggtttattcttcaccgcggcagacgggtgccggtggcggggagagtgacaatggatatgattatggtcagtttaggtgagaatgagggcaaacaaggagaagaagtcgtcatctacggcaaacaacaaggagccgagatttccgttgatgaaattgccgaaatgctcggtacgatcagctacgaagtcttatctgtgttaagccgccgcgtcccccgcttttatttcagagacggcaaaatcattaaaatatcagctccggtattatacgtgtagacggcatagatcccgcatttatgtatagaacaagtaccggcgtgagtgatttccattattttcgtcagcaaaatttcaaaacgccttctcttccgcgttcatgcacggaatagaaggcgcgaaaaagacatctagccaaaagcttgcgttacgaagctttatgctccaatctcagcttgtcagcaaccatcgcgatgaactctgaattggttggctttgcttttgtcatgcttaccgtatatccgaacagtgaagaaatggaatcaatatttcccctgctccatgcgacttcaatggcgtggcggatggcccgttctacacggcttgcggtcgtgttgaattttttggcgatgtcgggataaaggacttttgtgatgctgccgaggagttcaatatcgttatacaccatggaaatggcttcacgcaaataaagatagcctttgatatgggcaggcacaccgatctcatggataatgcttgtaatgctggcatcgagatttttccgcttcggctcaggctggctgcggataatgctgctttgcgcagacggcgcacggtgtgtgacactgctgacatttccgcttacctggcggatatggccgacaaggttttccatatcaaacggcttcaggatgaaataggacgcgcctaaatcgacggcttttttcgtaacgtcttcctgaccgaatgccgtcagcatgatgacgttcggctgcttctcgagctctgattcccgcagacgctccaaaaccgcaagtccgtccagatgcggcatgataatgtctaaaacgagcacatctggattcttatctttaaacaaagaaagacattcctgtccgttataagcaacgccgatcacttccatatcatcctgtccctctatatattcactcaacaggcttacaagctctcgattatcatcagcaacacaaactttaattttctccacgtttcttcctcccccaatgtattaacaggacgcaacccatttgactgctacatgttacattcgacaaaaccactacttccccttttaaaaaatccatatttaccaataatagtggtatatctttgtttttctagcattttctaggtttttcgactaaaaattaagtttgacaaatcaggaaacgtgaatttgtcgaaaaatcttcatgtcttattttacatgaatccaggaaagaagtgaagaacgcatcacataaaaaaactgccggatcatccggcagtcagcttgctttgtctttcccgtaaacatcaacacccgcttcagacagcatccattcgatatgaacgccgtagccgcttgtcggatcattgacaaatacgtgggttacggctccgacgacctttccgttctggatgatcgggcttccgctcatcccctgaacgattccgccggttcttttcagcagtttcggatctgtcactttcaacaccattccctttgtcgccgggaatttttgcggcgtggtgctgacgatttcaatatcaaatttctctactttatcgttttcgataaccgtcagcatttgcgcaggtcctttttttacttcatttgacagagcaatcggaagcgctttgtcggaaatgttgtttttaatcggctgatgcagtgtcccgaaaatgccgaacgggctgttgcggttaatatcgccgatcgttttccgttctgacgaaaaccttgccagtttttcgccgggattgccgccttttcctttttcaatcgatgttacagttgaacggacgatttctccgtcttctacaacaatcggtttttttgtatccatatcagagatgacgtggcccaatgcgccgtatttttttgttttcggttcaaaaaatgtcatggtgccgatgccggctgccgaatcgcggatataaaggccgattcgatatttcccctcggcttcgtcctttgtcggaatcagctttgttttgattttttgcttatcgcgtttcaccaataaatccaaagattcaccggttttgcccgctttttgaataaacggggcgatgtcgctcattttttcaattttatgtccgttcattttaataatgatgtcgccagattcaattcccgcttgttcccccggagactttttcccatcctttgtcatcacctggtgaaaaccgacgaccaaaacaccgactgaatgcagttttacaccgatggactgtccgcccggaatgaccttcaattctggaaggacacgcactttcgtttttttaatgggaaatccggcaagatcatatactacttctgaccggccttttgtttgccctgttatgtttgcatggccgtgctcttctttcagcgtaaaggcttctgataattcgcccttttcagcgcttattgatgcattgaccggaacggcctgtgtctggttttcaaagacgctcatttctgacggtatcagtaaatattctttaaacggcttaaaaaagcctacacttagtaaagaaacaaggagaattacacctattgctttcctcatgttatcgtgcattcattccttcactctcctcgctcctatcccacaccactttctttttctgctacatctatacttttgccttcctgcgcttgatttataaccggcatacgaagaaaaacattggatacactgttagagaaatggaacaaaaaaataagctgcctgtatcagcagcttatcctgtcgtttttacctgtccggcctgttttaaaagctcttgtgcatgccgttttgtcagatcggtcacttcaacacccgcaatcatgcggccgatttccgctaccttgtcctgtttggaaagcggcgtgacatgcgttgtcgtccggccgtttttgaattcttttgcgatcagaaggtgcgtatccgccatggcggcaacctgaggcaggtgtgtaatgcagagcacctgtgaaccggtagatactttatggattttttccgcgatggcttgggcaacccgcccgcttacaccggtgtccacttcgtcgaagatgatggaggtgacatcctgctgggaagaaaaaatactcttcatcgccagcatcacccttgaaagctcgcctccggaagcgacctttgacagcggttttaaaggttcaccggtgtttgttgaaattaaaaacttcacaaggtcaatccccttttgggtaagctgcacgggctgcccgttaacaaccggtgcttcactggctgacggatcggttttcacgagaaactccgtatcaaacgttgatttgcccatatacagactttttaattcctgatgaatcgcttccgccagctttttggcccatgcttttctgatttttgataaattggcggcttctacggccacatctttgccgaccgcctccaattccttcttcagcgcttcaaggtggctgtcgcggttctcgatttgatcgatttcctcttctattttggagccgtattccaaaatgtcttctaccgtcgctccgtatttgcgcttcagctgtttgatctcgtttaaacgggtttcaataaaattcagccgttccgggtcatattccatatcatctaacagattgcgcatctgaaaggttgcatcctccaacagataataggaacttgacacactttcagacagcttttgcagcggttcattgatatccgaaatatcttcaagctgggcagaggccattccgacccagtcaagccccccctgctcactgcggagcgcattataggcgttttgcaatgattcataaattttttcaaagttggatatctgcttccgctcttcctgaagaagctcgtcttcattcaattcaagcttcgccgactcgatttcttcaagctgaaattgaatcaggtctaaccgatgcgccatttcctgctcgctttctgacagcttcttcacttttttgagcagtttcatataacgctcatagccttcatggtaagcctgaagcgcggattcggcctcagcacccgcaaacctgtccaacagctctaagtgtttatcgtcctccattaacagctggttatcatgctgtccgtgaatatctaataaaagtctgccgatttccctcaaagccgcaatcgtcactaattttccgttgacacggcagacgctttttcctccggcattaatgtcccttctcatgacaatcatgtcgtcagatgcgtctattccctgctcacggcatacttcaaaaacgggatgaccgctgtccaaaagaaacagtccttcaagctcggcctttgtttcaccgtaacggacaaattcagacgagccgcggccgccgactaatagggaaacggcgtctataataattgacttgccggcccctgtttctcccgtcaggacggtgagcccccgttcaaacgaaatcgtcagttcctctataatggcaaagttttttattgatagttcagctaacaaacagcattccaccttttatctgataattacgctacagcagctccaaaagacggctttgaacgccctcagtatcttcaggcgtcctgcagatgattaagatcgtgtcatctccgcaaatcgtgcccatgatttcttcccattcgagattatccatcagagcgccgattgcctgagcattgcccggcatcgtttttaatacgatcatatggcttgctgagtcaatttttacgaacgcatccattaatgaacgcttcagttttgacagcggattgaaccgctgatccgccggcaggctgtatttgtaggagccgttgtttgtcggcacctttacgagatgcagctctttaatgtctctggagacagtcgcctgagttaccttatatccttcttctctcagcatgtcaactaagtcatcctgcgtttcaatctcatggcttgtaataagctctctgatttttatatgcctttggccttttgtcatgtaagcacctctgttttcaagctgttcttgtcattatgttaaccgcttcttgataaaaagtacatgatggcagaaaaaaggaataatagccccctattattccggtacatctgtctttttggcttttaatgtctcatgtgcttcgcggacggtacggagaatgtcttcttccggcagttcagcgccgtttccgtcttctccgccccattccaaatgaagcagaaactcaatattgccgtctccccctgtaatcggtgagaaggacagtcctttcactgtatatccttcagaagcggcaaattgattcatgcggcggagaacgtcagtatgaacgccgggatctctgacaatgcctttttttccgacggattcccgtccggcttcaaattgcggctttaccagtgcgatacaatcgctccccggtacaagcagcgtttttaaaaccgggagaatgaggcggagtgagatgaaagaaacatcgattgtcgcaaattccggcaaaccctctgtgaaatcggaaggctcggaatagcggaaattcgtccgttccatgacgacgaccctctcgtcctgtctgagcttccaggcaagctgattatagccgacatccactgcgtaggaccgctcggctccgttttggagggcgcaatccgtgaatccccctgtagacgagccgatgtcaatcatcgttttgccttttaccgagacgggaaacacttccagggctttttcaagctttaatccgcctctgctgacgtatttaagagggtttccttttaccgttaacggaagatcccgggcgattttttcacccggtttgtccaatcggttttcatttgagtatacgatgcccgccataatggcgcgtttcgctttttcccgcgtttccgcaaggcctttttctacaagaagtacatctaatcgttctttttttgctgtcatgatccaattcctttatgtgtcttcggcggcatcagcagtttgatccggttcataacctcagccttcgtgagaccgatttcttcaagcagggcggttacgctgccgtgttcaataaaccggtctgggatgcccattctgtcaatcggtgtatgatacatgccgaggtcatgagcgtattcaagaatcgtgctgccgaatccgccttcaagcacggcttcttctatcgttaaaatcggcagaccttcattaagaatggccttcatcatttgtttatcaatcggttttataaaccgcgcattcacgacacgcacggacaggccttctttttgcagttcttcagccgcttccagcgccatttcaatggtcgtaccgaatgttaaaatgaccgcgtcttttccgggacggagcacttcccatgttccgatcggaatggttttcagctctttatccatctttacgccgagcccgtttccgcgcgggaagcgcatcgcgatcggaccctcctcataattaagggctgtattgaccatatggcggccttcattttcatccttcggcatcattaaaacgaggtttggtatatgccgcaaaaaggcgatgtcaaagacgccttgatgcgtctccccgtcggcgccgaccaaaccggcgcggtcaatgccgataaatacattcgcgttttgccggcagatgtcatggacgacctgatcgtacgcccgctgcaaaaaggtcgaataaatcgcaagaaacggcttcatgccttggagcgccattccagccgccatcgtcgccgcatgctgttctgcgattccgacatcaaacatgcgttcagggaattctttcgcaaacccttccagtttagagccgaccggcatggccggtgtaatggcgacaattctgtcatcctcgcgcgccagctcctgcacggtaccgctgacaagtccgctccatgaaggcgccgcggctttcggcttgacgaaatcacccgtattgattttataaggacccgttccgtgccatgtgccgattgtgtcggtctcagccggtttatagcctttgccctttttcgtaatgacatgtaaaaggacagggcctttcgtttttttggcgtattgcaggttttcaaacagttcgtggtaggaatgaccgtcaaccgggcctaaatacgtaaagcccagctcttcaaaaaacatgcctgacacaagcatatatttcaaactgtcttttatccgttcagctgtggcggccaattttccgccgacggccgggatgcgcttaaataaatattcaagctcgtcttttacccattgatatttgccggccgtgcgaagccgtcccagcatagaatgaatcgccccgacattcggcgcaatgctcatctcattatcattcaggatgacgatcatgtctttcttctcatcaccgatatggttcagcgcttcaagcgccattcctccggttaaagcgccgtctccgataatcgggatgatatattctttcgatcctttaatatcacgggcggcagccattcccatcgcgcctgagagcgaggttgagctgtggcctgtttcccatacgtcatgttcgctttcgctgcgtttcgggaaaccgcaaagccctttatattggcgcaaggtttcaaactccttgccgcgcccggttaacagtttatgaacataggactgatgtccgacatcccataaaaatttatctttcggactgtcaaattctttgtgaagcgcaattgtcagctcgacaaccccgaggttcggcccgatatggccgccagaggcagacagcgatgtgatgaggaaattgcggatctcctcactcagctcttccagctgttcaattgacatctttttaagaaatgacgggtcctgtattgataaaagatccaaagcggatcaactcactttcagcatgaatttctgcaaattaaacagtgtctttttgaaaaaagaaaaagactccctttgtattttcatcgaaactgcttacattttaccataggagcggcagccccttcaaatcaggaccgtttttaatgatctctcgccgcgattaaatcacagaggtcatgcagcaattctttctgaagagaaaggccgctgatgatctgtttcgcctcgctgatatgatacgcaagcttttctttcgcaccttcaagcgttaaaagcgacggatacgttgatttttcattcgacgtatctgagccgaccggtttgccgatcctctcctcatgcccttcaatatcaaggatgtcgtctctgatttgaaatccgatgccgatatggctgctgaacaaacggagcttttcgacttcatcctccggcgcatctgccaaaatggcgcccgccgtcacggaaaaaccgaggagcttggccgttttccgctcgtggatggattccagctcctcaagcgttatccgcttttgctccgcttccatgtcggcagcctgtccgccgaccattccttccgttcccgccgcgctgatcagctcatcgacgagacggagccgtttttctgctgaaaccgcctcagacacatgagatgtgatcaatttaaagctttctgtcagaagcccgtctccggccaatacggctgccgcttctccgaagactttatggtttgtgggctttccccggcgcagatcatcatcgtccatgcaaggcagatcatcatggattaaagaatacgtatgaatcatttcgacagcgcatccgaccggaatcccgtctttttcatcttttccgtaagcattcagaacggctaagacgacgagagggcgcagcctctttccgcccgcttccaaagaatacagcatagattttttgagggtttccggcatcgcaagccgttctgtatacaaagaaagctgctgttcaatcagttgtttgcgcgatgctaaaaatgcgtccagtttatttgtcaccttcgtcttcctcctgaacgctgaaaggtgcaagttcgccgttatcttttaaaataaagtccatttgcttttcgacatgctgcagcttttcatggcacatttttgaaagggccatcccttcctgaaaataattaatcgcctgctccagcggcacgtctccttcttcaagctttgccacaatgccttcaaggcctttcatcgcctcttcaaatgtcagctcttcactttttttggtttctgtcattatcgttcgcctctcttttgcaatacttcacacgtcagaacgccgtctgtcatctttacttcaagcgtatcatgttgttccacttgatcaacgcttttgatcagctctttgtctttataggccagactgtatcctctctccatcacctgaaggggacttaatgcattcagtttaccaagaaccgtctgaaactgcgaatgaagctgcttcagctggacattcatgcttcgggcgagctgatttgagcgctcctcgtaccgttttttcgcctgtttcagctgggtttcagggtggagcgccgttaatctgtacgtattccgctccagctgcctttgtttcctgtccgtaagccctgtgagctgtgattggaactgctgatacaaaaggtcaaactgctgttctttttgggtatacaatcgtttcggaaaacggaacgcgtaggatgactggagcgattgaacccgttcttttttcttgctgatatgctgctgcatcgctcttgtcaggcggacttccgccgtttttgtccgttccattaagtccgtcgtgtggggaacggcaatttctgccgctcctgtcggcgttgccgcccggatatccgcgacgaaatcactgattgtaaaatctgtttcatgtccgacggctgatataatcggaatggcggaagcaaaaatcgcccgggccacgatttcttcgttaaatgcccacaattcttcgatcgaacccccaccccttccgacgatcaggacgtcacacattttttgggcattggcttcttcaatgcgcttcacaatcgatctgctggcattttcaccttgaacgagcgcgggaagcacaatgactttcacaagggggtatcttcttttgagtgtggtaatgacgtctctgacggctgctcccgtcggtgacgtgacgaccccgatcgtggccggaaaagcggggatggcctgcttatgccggtcatcaaacaacccttcgccggcaagttttttctttaattcttcatatgctaagtagagcgcccccacaccgtccggctgcatttctttcgcgtacagctgatagcttccgctcggttcatagacggagatgccgcctcttacgatgaccttcattccgtcttctggcttaaacgcaagcctcgaactttgcctctgaaacatgacggcctgcatgcgggcatgctcatcttttaatgtaaaatagatgtggcctctcgtatgaattttaacattggagagctcacccttaatccaaatgtcttcaagatgagggtccacatcgaattttcgtttaatgtatttggtcagcgcggaaaccgtgacatatgccgcttcactcacatcctgcactcctttcataaaggctttttgccctaaactaagaaaacccgctctggctgaaaggagccttaagaagcgggtatcgtgctcattgtcacactttttgtgactgtctccggttatctatgataacgtacgtctggcagatttaacagtattatgcgcaagcattgtgatggtcatcggacctactccgcccggcaccggcgtaatgaaagatgctttttctttcgcttcatcaaactgaacgtctccgcagagttttccgctctcgagacggttgacgccgacatcaatgacaatggcgccctctttgatttgatcagctttgatgaagttcgctttaccgaccgctaccacaagaatatctgcttttttcgtatgctcagacatatttttcgtccgggaatggcaatatgtgacggtcgcgttttcgttcagcagcagctggccgaccggtttaccgacaatattgcttcgtccgactacaacaacttctttgccggaaagatctacgttcgtctttttcaataactcgacaattccgtgcggcgtgcatggaagaaatgtatcttctccaagcagcattttcccgacgttgagagggtggaaaccgtcaacatccttatcaggggagatccgctcgattacggctttttcagaaatatgatccgggagcggcagctggacgagaatgccgtggaattccggattttgattatactgatcaatcactgttaaaagctccgcctcggttaagcttgagtcaaagcggtcaagcttaaatttcattcccattgtttcagcggcttttttcttgcctgtcacatatgaaacagaagcgggatcgtctccgattaaaatgaccgccaatccaggcactacgccttgtgctttcagctcttctacttcttttgccaattgttcgcgtttttctttagccgtttcttttccgtcgatgattgttgcagtcattttctttcctcctatgattcgatatcagttttaatgttagaaagaaccccgtttacgaattttgcagctttatcgtcgccgaaccgttttgccagctcaattgcttcgtttaatgacacgttagcaggaatgtcgtcagaataaaccatttcatacaccgccagacgcaggatcgcgcggtctacgtttgcaatccggtcaagcttccaattgacgagatggccggaaatcatttcatcaagctgaacctgatgttcgatcactccgtacaccagctgttcaaagaaggcatctgttttttcaccatcaagcgcgtgctcaatggcatcgttcggtgcaatatcgctgacatcaatctgaaaaagtgcctgcaaagctttttctctagctgttcttcttttcattttctttctccttcagatccgctttatccgcttgtcgttaagcttaaagagatcataacatatttttttctcaatcgcatgtcgaaatttaggttttttcaccctaatgccgaatattttcacaaaccgtattaatttcattcggatttcacagcatgaagaaactcggctgccgtttgtaagccggctttcttcatgcctgaaatgacgggaaacgtataaaaaaccaaagggctgcccatccccttggtttttatacgctcattacatttcttcgtcgatttcgacttcttgggctttcgtgtcaaattgaatgccgacgatatgaatattgatttcattaatggtcagagacgtcatgtttaataaggtttggcggatattctcctgaacgcttgccgccactttcgggatcgagatcccgaattgaatgacgcaatagacgtcgatggtaatcccgtcatcggctaaatcgacctttacgcctttgccgtgattgattttgccgaagcgttctacgacgcccgtggcgaaattgccgcgcatttcagcaactccttcaacttcggaagcggcgatgccggcaatgacttcaatgacctcaggagcaatttcaaccttgcctaaatgagcctcatcatgatccattttaagcacactgttgtcttccattcaattcacctcccgcaaaaattatgagcccattacatcatatgtttctaaaaactttgtattaaactctccgctgacaaatgtttcgtgttcaagcagtttcaaatggaacggaatcgtcgtttcaataccttcaatcacgaattcgctcagcgcgcgtttcatccgtgcgactgcctcatcacgcgttgttccgtatgtgatgactttagcaatcatactgtcatagtacggcgggatcgagtagccgggatatgcggctgaatccacgcgtacaccgagtccgcccggcggcaggtacatgttaattttaccgggtgaaggcatgaagtttttcgcagggttttcagcgttgatgcggcattcaatcgcccagccgttaaattcaacatcttcctgtctgagcgaaagctcctgtccggatgccactttgatctgttctttgatcagatccgttcccgtcaccatttctgtgacagggtgctctacttgaatacgcgtgttcatctccatgaagtagtagcgctgttctctgtagtcatagatgaattctactgtgccggctcccgtgtaaccgacggccttcgctgcttttaccgctgcttcacccatctgctccctgatttcagaatcaagcgcaggtgacggtgactcttcaagaagtttttgcagacgtctttggatagaacagtcacgctctccgagatggatcgtgtttccgtaattatccgcaagcacctgaatttcaacatggcggaaatcttctatgtacttctcgatgtacacacccggatttccgaatgccgtagcggcttcctgctgggtaatctcaatgcctttgatcaattcttcttctgtgcgtgcgacccggatgccttttccgcctccgcccgcagtggcttttataatgacaggatacccaatttcacctgcaagcgaaaccgcttcttccgtattttttatgattccttttgaaccgggcacaatcggcacgcccgccagctgcatcgtgtcgcgggcgatatcttttgttcccatttttgaaatggcgtcagccgtagggccgacaaacgttacgtttaattcttcgcacagctcggcaaagtcggcgttttcagctaaaaacccgtatcccggatgaatcgcatccgtgccggtcagctttgcgacgctgacgatgttcgttacatttaaatagctttcttttgatgttttcggcccgatacaaaaagcctcatcggccatttggacatgcagggcgtctttatctgcctcagaataaacggctacagtttcaatgcccagctctttgcaggcccggatgattctgacggcgatttctcctcggttggcgatcaatagctttttaatcataatagcaggtctccttactcagcttttacaagaaatagaggttgtccgtattcgaccagctggccgttttcaactaacacttcaacgatttctccttttacttcggcttcaatctcgttaaagagtttcattgcttctacgatacaaacaactgtattttcgctcacttttgaaccttggtttacgtaagggccggcttccggcgatgaagaagcataaaacgttccgaccatcggagacgtaattttgtgcaggttttcgtcttgtttcggcgcttcctgagcaggagcggcttcactcgcttccggttttgcagcctgcggagcaggtgcgtaagcggcgggaacggcttgggcttgtcccgttacattcactgccggcgcttcattttttttcagtttgaggcttacgccttcaatttcgtaaacaaattcgtcgatggaagattcatcgattctttttatcagttcatgaatttcgttgatttttaacatcagtttccactcctatgtataaaaaatagaaatttatgggttgctactaaaagtacatactatgtttatcttacaggagcgcttgtgtaaattcaacactgatctaaaatgacatcagaaaagcccgcagcgggtgcgggcggttcaggtctcttattttgtcggttcaaacgtgacggcgacgtctttcatcgtcttgatttctttttccaccaggtcaatgatagcggaagcttttgcgtttgaatgtttgtcagacatgacggtaatgttgattttgtctccttcagcatccacgagcgcatctttgtagccttgtgttttaatcagcgtttccagctgtttttccgtcccttcagcattgctcagcgccgtcattttatcgtaggcttcgcttttttcctttgcggtcgcatcatcgcttgaaacaatgctgtttaactgttccctttctttgcttctcgcgtcttcaagctccatgcggtatgcggtaaataagttttcatcagctgtttctgtggcgaccgatccgtctttgtccgaagcttcggctgatgtttctttatcctcttttgtgcctttagaatctttcgttccttttgtaccgtcttctttttccgtgccgcttccgctcttatctttcgtttcaggagccggcgttttttcagtggcgacttctccgctgcttttttcgcttttcatctgcacggcatttttgctttccggcgacataatataataaacacttaataccacgacgagactgagcattgttaaaagccaaaccgtttgttttttcagcatgatttatgaatcctccttgatttttttaggggcaaccgctacacgatagctcggaacatcgagcacccttgtgacggcatcaatgatggttttttttatttgaacgttgtccactccctgagcgacaacgagtacaccgcggatatcgggctttttcgtctggacgacgaccggggtttcctggtccccgtttcgaatcatgacaatttgttcttcagaggtttgatcggttacgcttcttttgccgccttctttatcggtttcttcagtggtggtgtcttttttcgttttatttttctcaaacactttcaaagatgttgcgtctacgtttacgacaattgagacatcctccacgccgataatcgtttcaaggatttctttcagctggttttcatagtctctttcgtaatcatcgatcgtggtttttgcgctgccgtctttcgatgccttaaaaacaggtgcgcttttttgcccgcttttgtcttccgttcggccggacatgacggtctgcaccgcttggtccttcccggttttctccggtgaagagaacagctggctgaccagcataaaagataccccgagcacaaacacgaacagaaagtaatgatattttgtcagttttggtttttctccgtctttcgcctgtccgatcatcagctgttttttgagtatggtccatagtccgtttttattcatggccgtttttctccccgccttccatataaaccgtaattttctcactgccgatttcccatatatccgcaagtttttctttgatgtctgcggcctcttttttgtcggctgcgccttccggttcgtatttgcggtctgtgcggatgtcgatcggtgcgacggtttgcacggttttttcagaagatggggccatatacacgctgatcgtttttacatcttcttctgaacgaacctgttcttccgctgtaaggcggatgtcgtctattttgtattcgtcatgactgaacatctcctccgctttcttttttagttggacagccatttcttctaaaacatatgcgcggtttgatgcttgtatttcttttttttctgatttaatttgattttttatatcagcggattgagattgctcttgttttgtcaaataatcgaagatgatttccgggtctgttttgaaaagtttgaatatcgggttgagcatgacaatgattaacagcaggctgacaaccatctttgcgtatttttgcatactggagctgggcagcagcatgtcgatgacgatggcgaataagataaataaaataatgcttgtcagccattctgttaaaaagctcatatccaatgggcctcctttatttcatcatcatggtgaggttgcctgctgtaataatgactgtgatgctgaggaaaaacatgagagagacgatggcgagcgccgcgaaaatatacagtacgcttctgctgatgacgccgaggcacgtaatgacgggcccgcctccgagcggctgcagaatagcggccgcgagcttataaataaaagcgagcgagagcactttgatcgccggaaacgcggagatgcagatcaaaattccgactccgaggattcccacggtgttttttaataggagcgaggcgctgatgaccgtatccgtcgcatccgtaaacatccggccgagcacgggaataaaattgcctgttataaattttgcagtcctgagcgtaatcccgtccgtcacagcagccgaagccccctgtacggagatgacgccgagaaacacggtgagaaatacggcaagcgcgccgatcgcgatatttctgagcagattggcaagctgcgtgactttatattgatccgtcatcgtgctgacgatgcttaaaatcgctgacaggaagataagcggcatgacgatgttttgaatgagaaggccgctcgtattcatcagaaataaaataacggggtgaaaaaaagctgcggaaacggctcccccggaagacgccaaaagcgcaagtaaaagcgggatgagcgcgagaatgaagcttgtcatcgtctggatcgcttcactggcataattaacggcaacatgaaagctgtttaaagcgagaataatcagcaccatgtagacgattgcataagccactttgctgacggtgctctgctggaacgcattttgcaggagctgcagaatgacacaaaaaatggtgagaagaatcaaagttcccagaagctttccgtttgcgagcacttcatgaaacaagtatgaaaataaagccttcagccatgcctccggcgagaacgttttttctccgttaataaagtcgacgatgcttcccttttggctttcaggcagaagaccgccgtattctgtcataatgtcgtcccaaaactttccgatgccttctgttttcagcgcttcggcctgctttttcgccacttcatcagaggattcttggtgaactgcggtttcctccgacgcaccgtctgttccggcagcttgtacacattcagtctgaaaaaataagaggatgaacaaaaaagctcccgcccaccgaaagcgcttcattttttgtgcccccctttccattttatttatgatcaagaaggaataagtccgagaatcgtttcaataatgacggtgagtatcggcacggccattaccagtatcaaaatttttccggccagctctattttcgaagcaatcgctccctggcccgcatcctttgtaagctgcgctccgaattcagcgatgtaggcgatgccgataatttttaaaatggtttccacatagaccatattgacatttgcattgacggctattttttctatcattctgataatgtcgtaaatctggtcgatgagataaagaaagatcacgcagccgctgaagacgacaatcataaacgcgaaagtcggtttctgttcttttacgatcagggagagaaatgtggcgatcaggcctaaacctacaatttgaacaatctcaatctgtaagcccccctatccttggaatagaaacacagctttgatctttttgaacaggtcatcgacaatcgtcgccaccataaataaaatatagataaagccaagcagcgtcacccactgggcgtattctttttttcccatttggtcaagtatggtgtgcagaaacgcaaccacgataccgactccggcgatttgaaaaatgacatttacgtcgactcccattttatgtttgctcccctcatgtttacatcaatagaagaatgagtaacagtccggctaaaaatcctaagcttttcaccattttttcatttttcgcctgcgcccgtccggcatccgcttccgccgcttccaaatgtgtaagcgcaagcttgatatgtttctgctgagaaacacggtcatggagcccgagcgtctctccgaattgcttcagcacatcatattcgctttttttcatcgccatggacgaccaattatgtttcaagctctgttcccaagccgttttggcggaatcgcttccctgctcaagccttctgctgaaagcttgaaacaataacgatacaggtttggaaagctgtgcggcaatttgtcccgaggcggtatgcagcggtgtatgcccgaacatgatttccgcttcaagcgattggagcgccgcgcgcagctgacggatctgcctcggcctttctatatacattttggcgatctcaaatccggtccaagtcgtcgctgtcagaataaacacggcacccaaaagcttcagcatgtcatcacgctttcagcatgcggaacaggttccccgtcctttccgtacatcctgctgatcgttcccggaccgcggcgccttgacagttcaacataccggtcaaacacgttttcctcccaaagcattttcagcgacggcctctttaccaagtctttcatattccacccgtgcgcagatacgataacggatacgcccgcatggagcgcctccagcagcgcttgtgagtcttccattctcccgatttcatccacaattatgacatcaggactcatagagcgaatcatcatcatcagcccttccgccttcggacaggcatcaaggacatcgattctgcggccgaaactgtgctggggaatgccccgcaggcagccggcaatttccgaacgttcatctacgatacctgtcttttttgcgggaatgcgttttgatccggtgctggaaagccgggccaaatcacgaagcaaggtcgttttccccgtttgcggaggaccgatgatcagcgtattcagccagttttctttccataagaaaggaatgagcggttctgcgattcccagcttctcccgggcgattcggatattaaaagaagtaatatcccggagtcctttgacggctccgttttcgacgatgactcttccggccagccccacgcggtggcctcctctgattgtgatatatccttttttcagctcttcttccagcgtgtacatactgtaattgctgagccggctgaggatcagctgtgcgtcgccggctgtacagacatatgacaaatacaaaggttgtcctttttggatcagttcaaccggcctgtcgacgcggattctgatttcttctgtatcccgtctcgcttcttcgggcacagcggagatggcatctctcaataattcagggagaacctctgtaatctcattcaatagagtctcctccttttttaccgattggcttctttaaaatgtatgatccgggacagactttatgacaccccggccctctatttatgcacaccggccaaaatcagcaccactcccgcaaaaatcaatattaattttgcatatgagagctgtccggcaatctgataaatgccgatcgtcattgtgatgataaagatcagcgggccgacgattgccaaaatactattcaccacaaccgcctttctgatgtcgtttgtcaaaagcatgataatagcggccgataattcaatgagcgaggacaaaactcgtaaaccggccatcgttaaaacagtagaattgattgaaccaaacaaaaatttcattgcaatcccccaacttcaagcattttgttacactatatgctctagctgacggaagtagtctcactattttcatatagaagaaagattctgaggcagaacgcaaaaaaagcctgccccgtaaaaggagcagactccgaatgtctttgactacgctcttgacacgtaagagccgtctgatgtatttacaaccagcgtatcgccttcgttcacgaaaaacggtacgtttacgacaagacctgtttccgttttggcaggttttgtgccgcctgacgccgtgtcgcctttaattcccggctctgtttcaacaactttcagttcaactgtgttcggcagttcaataccgagcgtttcagactgatacatcatgatgtgcacagacatattttccagaagatatttcaattcttcttcgatttggttttcgttcaattcaagctgttcatatgagcttgtatccatgaacacgtgctgatcgccgttggcataaagatactgcatcgtttttgtttcgatttgagctttcgcgactttttcacctgcacggaatgttttctcctgaatagcgcccgtgcggaggttacgcaatttagaacggacaaatgccgctccttttcccggctttacgtgctggaagtcaacgacgcgccaaatgccgccgtctacttcaatcgttagtcctgtacgaaaatcgttaactgaaatcatgtttgatgtcctcctatattccgatcacaaaataattaattctttaggggaatgcgtaattgtccggttgccgtcgtcagtgatgatgatatcatcttcgattcttgcgcccccaacttccggtatgtatatgcccggctcaaccgttaccgccatgcccggttcaagaacggccgatgacctgaaagacagccccggtgattcatggacttccattccgaacccgtgtcctgtcgaatggccgaaatactgtccgtagccttttgcagtgatgtgatccctcgtcagggcgtccgcttcttttcccgtcatgccgggtttaatatgcaggacaccaagcgcttgggcatcgtatacgacctgataaatctctttcagtttatcacttggctctccgaccgcgacggtgcgtgtgatatcagaacaatagcctttataataagcgccgaaatcgagcgtgaccaagtctcccttttcaatcaatttgccgcttgccactccgtggggaaggctggatctgactcccgaggcgacgatcatatcaaaggaagagccgtctgctccttgacgtctcatataaaattcaagctcgtttgcaactgaaatctctgagatgcccggtttgataaacgtcagaatatgttcaaacgcatcatccgcaatcttcgcagcttcctctaatatcttaatctcttcacttgacttaatcaagcgcaacttttcaacggaatccgcgacgggaaccatctccgcttcctgcagcacagcttggtaggatgcatatgttccgtacgtcatgctgttttgctcgaagccgagttttttaatgccgtactcaagaatcgtatccgcagccgtttggattaagcttccgccgtgctcgataatgtcaaaacccttcacttgcgtcttcgcctgctcggtgtaacggaaatccgtgataaatgccgcacgttctttcgatatgaccgcaaggcctgacgaacccgtaaatcccgtcatatactgcagattggcggagcttgtcaccaacattccgtctatatccagctgaccgaaaagatttcgcaatttctcaagtttcattccctttctcctcctcgccgattcttgactgccgcctgacaacgcgggagcatccccgcccggttttcagcataaaaaatgttcacttctcgtgaacattttaccataccggacagggattatacacttattcacttgttgccgagcgcccttgcaagcttgtctgacgtaagttcattgtagttgaaggaaattgagtagccgacaaacaaaccgtacagaatgtaaaggcaaagcgtcgtcacgattgtatctgatttcaattcagtgacggatttcacatcttcgaaaatcggattgaataagaaaaaaaccgcacaccataaaatgacgccgtacaccatccccggccacatggttttaaaacgcttcaggcagacgaaataaataaacgccccggcaattgaaatgaatccgatgacaacgatgctgaccatcgtgccgagccattgttttttccattctccgatcataaacggctgaagaatcatgttggggctgatctctgaaaaatgaaagacatacccgagatagccgatcaaactccaaaatacaccgccggcaaatccgataccgcaaattctgccggtaaatgaaacaggctgctgatcatcatcctgcttctttttttcttcctgttctgaatgtttttcgcttgtcatcatggcacctccagtcatagactgccccaaaattgaaaagtcataaaaaactgcgccatattttcattcaatgagtaaaatctaaagaaacggggtatactgcatgtagaaaaagcattgattttccggctgtctaactagaggtttaccgcggtttcctgtacaatagagtgaaaggaaatggttagtaaatcctaaaaaaacaggcaggttgataaacaatgtccaaacaaaaaacgccccctgcttacggcgggcaggctgtcgttgaaggggtcatgttcggcggcagaaaaaattatgttaccgccatccgcaggaatgacggaagcattgattttttcaagcttccgagagtgccgaacgcaaagctttcggctttaaaaaagattccttttttgcggggaattgtcgccatcattgaggcgagcgccaacggcacaaagcatttaaacttttccagcgaacgttacgggcttgatcctcaagatgacgccaagctggagcaggaagataagaaaggttcgggcttatcgatgtttttcagcctggcggtgatcggcgttctgtcgtttttgttcagcaaattcgtttttacgctcgtcccggtcttcttagcggagcttgtaaggcccgtattttcctcagacgccgcgcagatcggaatcgaaagtctgtttaagcttattctgcttctcggctacatttattttttatcaatgacgccgttaattaaaagagtgtttcaatatcatggagccgaacataaggtcataaactgttatgaacagaatttgccaattacaatagaaaatgttcagaagcagtcacggcttcattaccgttgcggttcaagctttattttatttacgatcattgtcggcatgttcatctatttactcgttccgacagatccgctttgggtgcggattttagacaggattgcgcttataccggtcgttctcggcatctcctttgaagtgctccagctgacgaacagagtgcggaatatccccgttttgaaagtgctcggttatcccggcctgtggctgcagcttttaacgacaaaggaaccggcggatgaccaggtcgaggttgccatagaaagctttaacgagcttctcagactggaagacatttcagaacagagcgaaaaaccgtctcacaacgtaatctgaaccgttaccgttattattttggaggtgggcagttatgaatcatcgtgtacaacctttttttgctgtattgatagcgcttggcgcattcggtttcatttatgcggcggtaaccaaccccgggcagatgatttcaagagcgatcaccgttattatcgcaggcatcattatttattttatcgtgaggacggtcctgaaccgccgcaccggccgtgacggaaccgctttcagaaaagcggccagacaatcgcggctccgaatgaaggagcaaaaagcgaagcaccgcgccggacacagaggccgggtcagccatttgcggagcgtgccgagcagcagcagaccgaagccgatgattcttaagaaaaaaagccagacccagcttaccgtcatagaaggcaaaaagaataaaaagaaaaacagagcgcttttttaataactccattgcttcaaaaattgctctgttctgctttttcctagctcaatgagagctagttttttttgcggtgtgagatgaaactccgtcgccatcacatgttccaccggaataaaaataatattttgttcgtactttgtcgcgatatgcctggcatcatgagcgtctttcatcgtttcaaacaaagccccgaacagctcaaaagcgttgcggattgattttttcgggcgctctttttcgttgggcgaaagcgaaattccgacgaccggccgtttgcgttcttttgaatacagccaaatcgggaaattgcttaacacgccgccgtcaacaaccgttgaggtgcctttttctgtcttcagttttatcggttcaaaaaaataaggaatgctgcagctcattctgacggctctggcaaccgggaacatctccggatttaatccgtagcggggaagatcgtcaggaagcacgatcatcgttccgttcgtcagatctgaagcgatgagacggagcgagccttttttcaaatcgccgaacgcgatgatgcccttcgcttttaatttatccgcaatccatttttccagcatatcgcctctgtatagtccgaggcgccaatatatcgacacccaccgcaggattttcagcgggaggaatgagtatctctgatcaagcaattgccttccgtccacctcatctatgatggaatgaacctctctgctcgtatagcccgcagcgataaatgcggcaataattgcgccggcgcttgttccggcgagcctttcaaagcgaaagcccttttcttccagcgcttcataagcgccggcaagcgccaccccttttatccccccgcccgaaaatacgccgtcaatctgcatagcgcgccctctcccttccatctcaaggtgtattattattttaagaaacggctgggcgaaatagaccaaagaatgaagacattaaaaaaagggcgccccatttcgggctgccctttattcaccgggattttcggtttttttctgtacggatttcaattcttttttccggctttcgtcatcttcaaaatactgaacgaggtcgccgatgcggtcaatgctgttccagctcagatgatgttcgattccttcaacatcattgtaaatcttctcttcatcaacaccaatgattcttaaaaactgctcaagcaattcgtgtctgtatacgagccgtttgccgatctttttgccttttgacgtcaatacgagcccgcgatatttttcataaatcaaatactcgtctttatctagtttttgaaccattttcgttacagaggaggggtggactgccaaagcttccgcgatatcagaaacccgtgcatatcctttttcttctatcagcatataaatctgttcaatataatcttccatacttggtgttgttgtcataagtaaccctcccaaaaagcaccttaactttataaaccattacaagtttacactaacggtcatgaaaaaacaaggatgcttccggtctgtcaagccttatcagcgcttataattccattcatcagacgcgtatttcgtctcagccagctcattgacaaatgcaagctcttcagacgtgagtgtgtaaggctcaagatgaatgttcagcccttcctcaaaaccggctttaaaagcgattctggcctcatccatcgttacccgtttcggcgctaaggcgttgatggctaccgccttgtttttgaaattccgctgcatgcgctcacggactctgtcgctcggatataaaaacagatcaaacagcttatcctcatcaatgtcaagcaggatggaaccgtgctgaagaatgacgcctttttggcgtgtctgtgcgcttccggcaactttccgtccttcgacgaccagttcataccacgaaggcgcatcaaagcagacggacgagcgcggatttttcaagctttctttttctttctccgttcgcggaatcgcaaagcaggcatcaagtccaaggtttctgaatccctgcagaataccttctgaaatcacccggtacgcctctgtcaccgtggccggcatttccgggtgatcctctgaaacgattacgctgtatgtcaattctttatcatgcagaacaccccgtccgcctgtcggtcttctgacaaacccgaggccgtgtttatgtactgcgtcaaagttaatttccttcttaatattttgaaaatacccgacagacaaagttgccggattccagccgtaaaaacggatcaccggtggaatttttttttggctgtgccaatataaaagcgcttcatccagcgccatgttaaatgccgggctttcgttccctgagtcaataaaccgccatgtttctttttccatacactgaacccttctttatcgttttaataaaatcagtttaacaaactgccttgaaaatgaaaaatatttcgtttcattaaggatgacaatcgcttcatgctttactataatagtatttgtcccaaaacgtccggtaagccttgttttcaggaagcagggttttgattttataagttaaaggagtagaatcgcattgtctaatatgattgctttaattattgttgcggcgtttatcgtttatatgatcgtgtcgtatttttaccagcagcgtttaatgaaaacacttacggaagaggaattccgcgcgggctacagaaaagcgcagctgattgacgtccgtgaaccgaatgaatttgaaggcggccatattctcggcgcgcgcaacattccgctgtcacagctgaaacagcgcaaaagtgaaatccgtcctgataaacccgtttatctgtactgccaaaacaatgtccgcagcggacgcgcggcacagacgctccgcaaacacggctgtaaagatatttacaacctgaaaggcggatttaaaaaatggggcggaaaaattaaagcaaaaaactaatcataaaaaaagagcttccgtataaaacggacagctctttttttacaccgtgtcagcggctgccgtcaagtgtacgttcgtattttaaaacgggctttcttgccgccttggtttcatccattcttttgacaactgttgtatgcggcgcttcctgaacgatttcaggcgattcctccgcttcccgcgcaatttgaatcatggcatctataaacgcatctagcgtttcctttgattccgtttccgtcggttcgatcatgatgctttcttcaacattgagaggaaaatacacagtcggcggatgatagccgaaatccaaaagccgtttggcaatatcaagcgttcgtacgccgagctttttctgccttcttcccgataacacaaattcatgcttgcaatgacggtcatacggaagatcataataaggcgcgagtcttctcatcatataatttgcatttaaaaccgcgttttcggtcacagcttttaagccgtcaggccccatggaacggatatacgtgtaggctctgacattaatgccgaagttgccgtaataaggttttacacgcccgatcgactgcggccggtcatagtcaaaagtcaaacggccctcttttttcgtgagaacgggtttcggcagatacggaatgaattcttttttcactccgaccggacctgagcccggtcctcccccgccgtgcggcccggtaaatgttttatgcagattaaggtgaacgacgtcaaatcccatatctcccggtctagctttacttaaaacggcatttaaattcgctccgtcataataaagctttccgccggcctgatggacgatttcagccatttccgtaatgttttcctcaaataacccgagggtgttcggattcgtcagcatcagcgccgctgtttcttcgtttaccgctcttttcaaatcttcaatgtcaaccagtccgtgctcatttgacttgacggtaatcgtttcaaaaccggcgaccgtggcggatgccggattcgtaccgtgggctgaatcagggacaatcaccttcgtccgtccgaagtctccccgcgcttcgtgataggcgcggatcatcatcaggccggtccattcgccgtgagcgcccgccgcaggctgcagcgtcacctcatccatgcccgtaatctcctccaagtgtccgcttaaatcgtataaaagctcaagcgccccctgaaccgtgtcctcgtcctgaagcggatgaatagcggaaaaacctgcgatccgggcaattttttcatttaatttcggattgtatttcatcgtacaggagccgagcggataaaagcctgaatcaactccgtggttcctcttagaaagagcggtataatgccgcataatatcgagttctgatacttccggcagctttgcgtcttcatcgcggatatagtcaccgggaagaaggctttcaagctctgtttccggcacatcaagctccggaaggctgtaaccgatacgcccttcgcgggacatttcaaaaataagcgcctgatcttgattattcatgttgatcccccaatcccgcaataagcgaatcgatctcttcttttgttctcagctctgtgacggcaatgagcatatgctgattcagttccggatacgcaaggcctaagtcatatccgccgatgatgccgtcttgcaggagccgccggtttgcttccttgacgggaagattcagcctgacggcaaattcattaaatatcgggccgtcaaatgctacgtgcaagccggctttttccgcttggcgtctcgcgtaatcagctttcaatatattttggcgggccatgtctttgacgccgttttttccgagcgccgtcatcgcgactgaagccgctaaagcattcagcgcctgatttgaacaaatgttagacgtggctttgtctcttctgatatgctgctcgcgcgcctgaagagtgagaacaaaacctcttcgcccgttttcatcctccgtttggccgacaagccggcccggcacctttctcatcagttttttcgttactgcaaaatagccgcagtgcgggccgccgaacgccgcaggtatgccgaaaggctgcgcgtccccgacgacgatatcagctccgtatgccccgggcggtctcaaaataccgagcgcgagcgggtttgaagaaacaatcagctggctgtttcctttatgtgcgagcggctcaatgtcctttaacggctcgatttgtccgaagaagttcggatactggacgatcacggcggccgtttcatcacaaacggcatgttccaatgcttcaagatctgtgacgccgtttttcgcgggcacctctacaacctcaatatattggccctttgcgtatgttttcaaaacatcccgcgattccggatgaacggctgcggaaatgacgatttttttctttttcgtatgtcccgacgcaagcatcgccgcttccgccagcgccgttcccccgtcgtacatagaggagtttgcgatatccattcctgttaattcacagatcatcgtttgatattcaaaaatcgcctgcagctctccttgtgagatttcaggctggtaaggcgtataggccgtgtaaaactctgatcgggatatcacatgatcgacgataaccggctggtagtgatcgtacactcctgcgcctaggaaagatgcatatgtaacagcgtctttatttttcgccgcaagcttcgtcagctctctcgtcagctcagtttctgactttgcttttttaatttggtagtctttttgaaacctcacatcttccggaatatcggcaaacagttcatcaattgtttctgcgccgatggctttcagcatttcttttttatcctgttctgtcgcgggcaaatatcgatgcttcatatgactctcctttttcagctctgttttggacgtttataaaacggtgtgcggacaatcttcgcttttaccgtttttttacggatttccacttctacttccgttccgacttcactgaattccgttttgattaaggcaaggccgatatttttctttaaagtcggagattgtgtgcctgttgtgacttcaccgatcggaacaccgtcttttttcacggcgtacccgtgtctcggaatccctttttcaatcatctcaagtccgaccagctttcgcggggctcctttttctttctgttcgcgcaatacagacttcccgaaaaaatcggaatctttcttgtgtttcacggcaaatccgattccggcttcaatcggtgtaatatctttcgtcaattcctgaccgtataaagcaagcttcgcttcaaatctcagcgtatcacgggcgccgaggccgcacggaacgaggccttcatgctctcccgctgcaagtatctccttaaatagatgaaccgcatcttcattgcggcaatataactcaaatccgtcttcaccggtatagcctgttcttgaaagcaggacttggcgtccggcaacgtccgccccatcaataaacgtaaacggctttaaggaggacaaatcacattcagtcagcttcgtaagaaccgactgagcattcggcccctgaacggcaagcagtgaaatcccgtcagactgattcgtcagcgtgacatcgccttccgtatgttccgtcagccaggcgatgtctttttcaatattagacgcgttaatcacgagcagatagcagctctcgcttttctgatagatcagcaagtcatcgaccgtaccgccgtcaggataacacatggcggtatagagcgcgtttcccggctttaaatcggcaacgtcatttgtcatcattttttgcagaaaagacagggcgtctttaccggatacttcaacttcccccatatgggacacatcaaacaggcccgcttttgtgcggacggcttcatgctcctctttaatagaagaaaattgaaccggcagctcccatcctccaaaatcaatcgtttttccgccgtattctttatacacgtcataaagcggtgttcgtttcagcatcatcttcccccttcagtcattggcgcattgtaaaaacatataaaaaaggacagagaaacacctcatgaaaatgaaggtttctctgtcccggcacctgaaagtttactttatgaacatatcataaagacgtcccctttggtggcctgcttcttctaagtgcagacactctccagagttgcgtcgagcaagagttcttttgcctgagagattcactccgcagtttgctccttcggcgcccggacgcccatctttcgtccgagtctctccccttgctgtcattcgctcatatttaccaattttatggacatactaaagcaatatcttttagtgaaatcattacttatatcctaccaccctcatttacgtccggcaacaaaaattatgataaatcagttttttaaaagaaaggcggttttgttacatatgacagcagagatcatatttgatgcaaactggccgggagagttttctgagcggctgaaaacggacggtccctggtcaaattgggagatgtacaaactgtcggctgaagtccagcagacccttgccattcctgaatttgaagggttgagggctcctttatacctgcccgatttcactccgctcccacatcagcttgaggtcgcgcagaaagtcgttgaaaaaatgaacggcaaggcgattttggctgatgaagtggggctcggaaaaacggtggaagcgggcctgattttaaaagaatatatgattcgcgggctggccaaaaaaatcctgattcttgtgccggcatcactcgtttcccagtgggtgaaagagcttcaggagaagtttttaatacccgctgttgaacagaagaaaagctatgtgtgggaacagtgcgatatcgtcgtttcttctattgatacggccaaacgctcgcctcacaaagacattgtcctttctattccgtatgatctcgtcattattgacgaggcgcacaagctcaaaaacagcaaaacgaaaaattatgaatttgcgagaagtcttgtgaagaaatactgcctgcttctgacggcgacgccgattcaaaaccggatcgaagaaatcttcaatttagtgtcactgttaaagcccggccatttaggaaacgaaagcggatttcaagaaaccttcaatcagaaggacgggattgacgctcatgagcatttgaaagagctcgtcaataaggtgatgatccgcaacacgcggagcgacaccggccttacatggacgaagcgccacgtggaaacagtgccgatcaccttttcaccgacggaacaggcgctttacgatgacatcgccgcactgaaaaacggcacggaaaagcccgccagcgcattttccattatgacgctgcaaagagaatgctgttcaagcagggaagccgtgtatatgacgctcaaaaaaatgcttgaccaaaaagacaaacaagcgcccgcattcgatgatcagacgatcgctaatttaatggaccgcatcaatcaagtcacgcaaaactcaaaagcgattcaagttgttgacttgatccaaaagattaatgacaaagtcattatttttactgaatacagggcgacacagatttacctgcaatggttccttcagcagaacggcataagctccgttccgttcagaggcggatttaaacgcggaaaaaaagactggatgaaggatctcttccgcggcaaagtgcaggtgctgatcgctacagaagccggaggcgaagggatcaacctgcaattctgcaaccatattatcaattatgacctcccgtggaacccgatgcggcttgaacaaagaatcggaaggattcacagactcggtcaggaaagagatgtccatatctacaatatggcgacaaaacatacggtggaagagcatatcttaaaacttctgtatgacaaaattcatttatttgaaaatgtcgtcggagaattagatgacatcttaacaaaaatcaaagtgagcaattttgaagaccatttgcatgatattttatgccattcgctgacagaggaagaaatgagaatcaaaatggacaatctcacctcttttctgtcgtacggtacggaaaagcccgccagaaaaaaaggatcttaatctaaaaggaggaagcgcgacatgagacagcaggaggttcacgaatttttactgcgcttttttgaagcgaaccactgtccgattacagaacacgggccgggttttatgacggttcagttgacggtcgagatggacaaacaaattatgaaccgcccgttttattggcattggcgtgaaaaaacgggcggcgaaccgaacccgatgaagatcacgttcatcactgataaagaaacggctccggaggatatggacggcgaatttatttactttggagccccgcgcctctttcaaatctttcaagcagttaaacaaaatgggagatttacaagaatatatgagaaaattgtatcagccggagccagagtgccgcttcagccctggcttggattaaatgtagtgatttcataccaatccgacatgaaaaaagacagacttttgtctttaggcctgcatcttgtttctggaacaattatagaggggtttcagcagaagcttgcaccgcttccgctgacctcgcaaatatcagactattgctttaccatatcgccgatgattaagccggaaagcggaattaaaagaatggagcattacttaaaagacgctgccgccaaagagccgtcagactgggctgacagcgcgatcgccagatggaaaaaggacctcaggctgctcgatcagttttatgagcagacagaggaaaaacctgaagaataccatttggaaaaacaagcgctgaaagccttatatcagccgaacattcacattcagattgaaaacggcggtttatttttcctgcaaagtaatttttctggataagcgttatccattcgacacctttcccgttttttctggaaattctatattataataaaagtatatagaaaaaatttctggcgtttcgcatgcgatgaatcacttccagacatgtaaagataaggtcatgggcggattggctgaaatacataaacaagtattttaggaggagaaaatgcatgaaaaatgcaaaaatggaattttcgcaattagataaggaatgggttgagctgatattagaagcccaaaaagcaaatatcagcctagaagaaatacgcaaatacctgctttcgcataaaaagtcttctcaacatatccaggcagccagaagtcataccgtaaatcctttctgaatgtgctataatatcacaaggaaggtgatgacattgattggccagcgtattaaacaataccgaaaagaaaaaggctactcactatcagaactagctgaaaaagctggggtagcgaagtcttatttaagctcaatagaacgaaatttacagacgaacccctccattcaatttctcgaaaaagtctccgctgttctggacgtctcggttcatactttacttgatgaaaaacatgaaaccgaatacgatggtcaattagatagtgaatgggagaaattagttcgcgatgcgatgacatccggggtatcaaaaaaacaatttcgtgaatttttagattatcaaaaatggagaaaagcgcaaaaagaggagtagtgccgccatatgtgcacaactcctcttttaactgtccgactttcggattagtttttatcctcactgtgagccttttcattttccttgacgtaaccgtctttatccgtatgatctttcgtaatggtcaagccgttccattgcgttgcttcaaaagagaattgaagagaaatcgcattgccttggaacttgttttgcacacttaatccgtccgcagtttttgcggtgtcatttttaaattggatttccattctcacctggtcataatcagcaggcgttttcggaactccgtcgtactcaggagctgttttgccgttaatggttgctacattgacttttccgctctcactcaggaatttcggatcaatgtgcttgctgatcgcttcggcagctgctttatcctgttttgttgacattaagtataagtctttcaggctggccgccttcaaaatgatatttttaggataaccgttgcccccttctttaccgactgtcagaaccgtaatttcaaactgactgaggaaatcctccgcagattcatttcctttctttgctcctttaaagtcagtaaaattcaaagccatcagcacttctttaatagcaagtgaaccattgtttctgaattcaaaatctttcgtcaatttatcgcctggttttaagtttgacaaattgacattggctgattgttctttagccgataaatcaagtgttcctgacgcaaatgtagcgtctgtcgacttcacatcattaaatgcggcccatgtgcctcctcctactaatgctaaaccgagtgcggctgaggcaacgcccaagcttaatttctttttcatacccatgtttgtactctccccttactttttatttttgttatcaaatcctgtcgccaggttgcaaccgtattcatgtggagatggttccctttttcgcatgttcttccagcgctttcgttttccgctcaatatcgcggagggcgctgacaatgactgttattgagtaaatcaagagcatgacgccgggaacgattaacagaatcgccgttccgatcggctggctggccaaatgtatgacatatccggcatacggaagctgatatcccgtatactgggccgccactttttcagcttgaacgggtgcggcatccggggcggcattatggtccccttttgtctcaaacagcaggttcccgtccttttttgtgatcccgattattctgtgtgtgacggctgttccgtcatcttgggtaaaggtgatcacatcccctttttctaagtcattcacgtcagaaattttctttaccgctatgagcgaacccgtcttaaattccgggtccattgaacccgacagcacggatttcagcgtatagccgaagatggccggctcacccccggaagcccgggtcgaaatcaccgttaacgtcagcacaataatcaagctgaagatgacggcatacaaaatattactgatcagtttcagcgtttttttcatgttcttccccgctttcttttaccggctcagccggctctttctccgttttctttagatcggaaacggtcgcctgttcccggcatttgacgagtttcatcggttttgaccactcaaatttttcttcgtccgccggatacccttcaggcttgtaaaccttgaatgcgtatatgcccggcttcaaagaccgctttgactcaattttataaatcgttttgctttttttatcagtaataagccctttatccacaacattgccgtttcgtaaaggctgctgctgagaagcaattttatggagctcccatttccagtcagaaacagtccgctcttttcccttattctccagctcggcatagagctgaagcggcgcacacacggtgcctgacgtatcagtttgatttgttatatgtaaatcactttgatcccagcgttcgtcataacggcaatcgtcatccgtatattgaaaatctccgcacgtttgaaccgggagactgaagcttttcacatcattgaaggtggaacttgtatcacctgtgaactgagcacatatcgtcacggacaggcaaaaaatgaacgaaagccgtaacaatagcatcatccgccatctcaccttgcctttttttttcattcgcaacaatcggaacatgccttaccccctgtaaaactgttaataaatatgacaaccgttctctttaaagaaccatatgaacaaagtataatcaaggattatcgtcttgaaaaatgtcaaaatcggtcaaattgttcgtttttgagaatggtatcttttaaaaacagcgttttgcttcaaattacacacctttttggaattttttctaataaaacgtgagaaaataacgaggtgcctagaacaaaatggaaagtatatacagcgaaaggacgaagaatgatgatcaaacaaagtctgatttgcctttctcttcttgttttcggggtttcaggaacagctcaggcggaaacggtgcctaattatgctgttcaccataaatcaaaatgggaaaagttagcagaaaaggaagctaaaaaaagatatccgctcgcccaaacgttatttattcaaaaggtgtgggatcggaaaagaacggacgaagcagtcaagcaataccacttgacattgcgggatggcgcaaaagaatttggcgtgtttgttacgatttcttttaatccctacagccaaaaggtaaataaaattgccgtcattgaggaataccaataaggccctcctgtatcaggaggacctttcgtgtgattcactttattttttccgctgcatccacagcttaaaactatacggcaatattccgaaccagtgctgagaagccggcactttcttttctttccgcacttcttttcgctctctccgttcctgtttcggcgtatcgaaatatttaacgaattgctcagtcatatattttacataatcatttgttttcacggctctcacctcatagtgctgtctttactatgaagtgttgtcccgccgcctcttttttatacttccgtccattgaatcagctgtttcttcttctgatcgaacaaaaggtgagcctcccgtctcgtacctgtcgtggtttccgcctgaattgtaacctgaaccgtttcccggcgatcactccccgtgatgtgaaaagaaacggtgccatacggaaaacgctgtgtaccagtttggaccttttgtccctgtgtcatatggcggcttgacagcagcgcgccgttttggagcaggttctctccgatccagtactccccggcctcttttgcaaatgtttttcgggtgatgaaatcagaggaagtatagctgatgacaagtaaaactgcggcagaaacaaacagaaccgcgggatatataaaaccgtcagatttgtacatttaatcacctttaaaagagctgtaaaccggaatgaccgcctgattctttttacctgtaacgcttgagatctctaataagagcaggccgtttttcacatcagccgttaatgatgccgcgttttgcaggatcggcacgtggccttttccgtttactcttttccttatcatcttatgataaatttcaaaacgcacttcttcgtctcctgttttccggcatgctaacgcccgtccgccgtccgccggcttcacagtctcagcctgtttacattcgttcatgatctgctgaacggcaatttgatgctcccggctgtctaatccgccgttatcggtccggtttgataaaaacagatgtaaaatcggacccaaggtgcctgataggaaaagacagactgccaaggagaacaaaacattaagaagcgtaaaaccagtctgttttgagaatgctgaggcacatttctttttcgccgcggtcagccgtacacactttgtaatactcaccatcctccttccacttcacaccgggagacggcggcttttttccggtcatcatataagtgctgatatgtttctgaagaagctggtacgcttcatagcgatcttctattttcggaccatctgtcagcatgcccgtccagaccggaatgatagacgtcataaggaacagccaaatggccattgctgatagtgtttcaatagtagagaaccccttatttccgtttagcatggacatttccgctccctaagtaaactgtgatctcataggtgaacccggcgctcttcaattgaatctttcctcccgaattcggatggcctttttcgttaaattcaaggctctccggtaaagtcacaagtgtaatgtgaagcgaatcaaaagaacgctcgacaatccttccgcctgactgcagtttgtatttatgctcttttggaagaaaagtgatttttgttcttttatgttctgcgatagccgtttcctgagcaagctgaatatctttttggagctgttctgttttttgccgcacggcaaggtgggtgcaggccggcggaaccgtcgtgaacaaaaccgtcagcaggacggacgccaggcttaacacaatcaggctttcaagaagggtgaacccattttctgtccgcctgttattgttcaactgtaacttctccgccactaattaagatctgtttaccattcgggcaggctgtattctttttgatatacccttctgattgtaaatcgttcatatccggcattttaccttcatggtcgatttcgtacgccgtcacttgggctttcaccatattctgcagtccttcacagcctttatgctgaatgctttgattatgttttgtaacgttaggaatggtgattaaaagcagaatggaaacgataaataaaacgatcagcatttcaattaaagtaaatccatcttgatttttcagacgaagcactcccttacatttggttcatcatctggtacatcggcatcagcattgacatgtagacaattaaaattataccggccacaacaccgtaaatgacaggctggagaatgccggtatacttcgccgcgttttgttcaagacgctccatcataaactggctgtacgtataaagttcgcggtgaagccggccgtttgcctgtccgtggctgactgcagccgcaagatctttttcataacacggatgcccggaaagagcggattctatggtttctccggctttcagacgtgttatgagcatctctgcttcttcacgataaaaaggcagaaaagattgttctttaaaagctgttaagctgtcatagatagaaaggccggatttcagaagactgctgagctgtaaagagaaaaagtagctgttaaaaagaacggccgcttttcctaataggggtattttcacaacaatcagcattttatcttgcggggattttttcttacataagaaccaaacgtacaaaaacaagcagaaagcggcggacagcgccagtgcgcaggcttcatgaaaatgccgaaaaaacacaaagatgaaagcagttgcaccggatgtattcatattcattgattgataaatcccagaaaactgcggaatgattaaactttgcaggatataaaacatgacacagacggaaaaaattaaaaacatcggataccggagcatttttttgatttgattcgtctgcatgagctttctctgtaataattcgccgctttgtttcatcgcccccggcaattctccgtgtttctccgcgaaatagcagatagagacggcttctttgtggaaagacagtgcctcaagcacttggtaaaacgcatcaccttctctcagccggcggattccttccttcagctctgcaagctgacgtttatgcagctggagttgcagcagtctgagcccttcaatcaggctgtatcctttttccgtcatttcaccgagccttttcaaaaaagccgcttgatccttcaacggccatgttcgtttaatccgcttcatgatacacccaccgatcgtaattgtcggtcgtgacatagccgagcgcgattccttttctgatcagcctgcggagcgtctgatattgaaaattggcgtgctctccctttgcttcctgaaagcattgggtgaggtttttcccgtagagcagttcataaatgcccgcacggcgtgtctgcctgtacatccggcagtacacggaacagttttcctctttgcagaacggacatgttaaatcaaccagacgctgagcggcaatagcaatgacggtttgttcaatttctgtcatgttcacgccgaactccagcagcctgtatatggcgcccttagcatctcttgtatgcaggcttgaaagaacgaggtgtcccgtcatggccgcgcggactgcgatttcagccgtctcggcatctctgatttcccctaaaatgatcatatcgggatcatgtcttaaaatcgcttttaaaccggcggaatatgtgactccggctttttcattcacctgaacttgcaacacatcctcatctcttgtttctacggggtcttcaagcgtgacaatacgccggttgaaatgcctttttgcatagttgacaagcgagtaaagagtggtcgtttttccagatccggtggggccggtaaacagaagcaggccgtgcgaatgcttcagaaaggacaatagtgcggcgcccgccccccgaaataaggacagtttatccagagggggaatctgccgcttaggcaaaagcctgatgacaagactttcatcattcattgtcggcaaggttgacattctcaaatgaacggtttccgtcggaagcggcagagacaatgacccgttttgcggcttacgtctttctcctatatccatggccgataaaaacttaaaatgagaaataagccttacgcattcctctttttttaagactctttttttcacaagagcatggccgatgcgaaaatgaatgaaagcatccttttctctcggcacaatgtgtatatctgaagcccttgccatataggcctcgtttatgatgttcctgctgtatgtttctatatttttcacaagacttccctccttccgcacgtattgtaaatcagatacacaaaagccggcaaaggagagattatgcgttttacagtgtgtaaaacgtaaaaaaataaaaaataagccccctgacattgatttaccgaatgaaatccggaaccattcggccattttcttccatcaaaaaaagcaggcgtatgcctgctcttcttagcgtttcttttctttccgcatatattttttttgatgctccctcaaaatgtcccctgtccagcctttctgccgcagataaatataaatcagcagggttgatacaataatgagcacgatggaacagatatacgcatatttccaatgaagctccggcatgttatcaaagttcatcccccagagagctccaagcgccgtcatcggtgtaaagagagttgtaaagatcgtcaaggctttcacaatttcatttcctctttgggaggtaatgacttcctcggcgtgcagcagattgctcagttcctgatcaaactcattgatatatgtaattcctctttccatcttttgatgagctctgaggtaatctttctgcctgtcatttttcgggagaaaagcttcttttaaagccatttccactttttgagcccccagtgtaaggcctttccaaatgaacagctcatggcgcagtttatgcacattttccaagattcctttgctgttgtcatcatgaatctgccatttcagcgtccgctgcttgacttcaaattcatccagtccgatcagataggaattcatcagctctcccagcagaacaaaaaagccttcaatcggattttcacaggtttgaatctgctgtgtggcatgcttttcttttacaccgcgcaacagcgaaaaatcaaaattaattgtaaaaaagaagtctctcgtaatataaaagtgaaatacggtatggtttttttcatcatctaatccttgatgatagattaaagaaccgaaaaccgcttcattattctgatcatttgtatctgagcgcagaaagtttatatgattttcatgttcaaaccacttttcgcattgcggccagtgattgtgatggatcatttttttcgcttctgtcttttcatgcggaccgagctggtaccacagccagtccgcacccgaatgtaccttcatctcttgtcatcctccagtatcgctttcttgttttattaccgtaaatgaagaaggctaaaccaggttcgatgtttgagcagctttctacagtggtattattccgaaaaaagggaggtgcaagccttccttcgcggaaggcgttacattgtatatcatcaaactatctgccatcgtactatttattttattaacggcatgttttgtcgccatagagttttcaatcgttaaagcaaggcgctcccgcattaatcagctcattgaggaagatgtaaaaggagcaaaagcagccaagcatgtcattacacacctcgatgaatatttatcggcatgccaattgggcatcaccgtcaccgctttgggaatcggctggctgggtgaaccgacagtcaaagcgatgcttcagccgttatttttaaagaccggagttcacgaagcggttgcccaagtcctgtcattgatcatcgcctttctgctggttacatatgtgaatgtcgttatcggcgaactcgccccgaaaagttttgctatccaaaaagccgagcggattacacttttgtctgccagaccgatgattttgttttataagttaatgtttccgttcatctggctgctcaatcattccgcccgcctgattacagccatgttcggcttgaagcctgcttccgaacatgaaatggcttatacggaagaggaattgcgggtgctccttgccgaaagctatcgaagcggcatgattaaaaaaagcgagctgcattacgtaaataacatttttacatttgataagcgcactgccaaagaaattatggtgccccggaatgaaatggtgagcctgccgttagacagcggatcgggacatatgctccgggacattatcaaaacaaataaatatacccggtatcccgtagtaaaaggagataaagatcatgtagtcggcatcatcaatataaaagaagttttattcagattcctgtcagaaggagcggcgtttacaaaacacgaactcagcccttacatccagccggcgatccatgtgattgagacgattccgatttatcaattattcgttaaaatgcagcgggaacacgcccatatggccattctcattgatgagtacggcggaaccgcgggattagtaacggcggaagacatcattgaagagatcgtcggcgaaatccgcgacgaatttgatacggatgaaacaccttccgttcaaaagcttgggaagaaccgctatctcctgaacgccaaattgctgatcagtgacgtcaatgatgtactcggaacagagattacggctgatcaagtcgatacactcgggggctggtttcttactcagcatattgacgcgaagcccgggagcaccattgattttgaaggctacacatttacggtaaaagaaatcgacagccatcatatcattacgattgaagctgaaaaagctgaatagctgagggagacatccctcccggccattcagctttttatcatcttaatgattcttttacgataaatccgttttttgccagcgctttcgccagactctgctccgttttcacctgagaaaaatcgatgccgagcttcacgacggtctgcgcgatttccggcctgatgcctgagattgtcgtttctatgccaagaagttttgtgctgtcaatcactttaaaaatctgataagcgaccatcgtatccacaatcggcacacctgatatatctaaaaataaataagaaagacggagtgaagaacattggtcaagcaccgattccaaaatcatttttgcccggtaggtgtcaatttcgccgacgagcggcaaaattccaataccgtcggcaatcggcataatcggcgcacttagttcgttaatcatttctttttgggcgtttaattgtgtaaccgtcactttataatattcctctgtaaatacttcaatcatatggtcaattgctttgttcagcttctctccccaatggaataccgcattcgccccaggcttctcagacattgtttcacagcacgtctgtatgcggttccagaccaatcttcggaattctttaaagctcgtgacgctttcatagaccggtacttcatggacggcccggtcccttgcgaactgaagcgcccatttcgtcagctcctcttccccgccgtctttttccgataaaatgccggcaacgatttcaattaacagacggtgctgcatttccgctttctgatcatctgtaggccgccccgattttggtatgagcagccactggcgtgtgatttcacctgattcttcaattaaggttcgagataatgcttcactcaaatgtttcacgggtctcctccattcaaattcctttgtatgtataaatcggcgccggacgcacatactgtaattacatccgatgggctatagccaagcggtaaggcaatggactttgactccgtgatcgttggttcgaatccagctagcccagtcccgcaaccgcaaaaaacgaagattagctgataaattttgatcagcggatcttcgtttttctcttatgatacagattgatgtaccgtttttttcttcgtcagcttcatcagttctcccggattgtatccgataacgagtttattgcgatcgatcagaatcggacgccgcagcagtttcggcttctcagtcaaaagcttcagcacttcatttacagtcatttcttcaatgttcaggttgagatttttaaatgtttgacttctcgtcgccaatatttcatcaattccttcagtcgttaatgataagatctgcttcaattcatcaattgtcggtgtctccctgaatagatggcgctcttgaaagtcaacattgtgggcttttaaccaatgtttcgtttttcggcatgatgtgcagctcgggtatgaataaaaaataacttctttcatttttaaaaattcctccctcggataatccgtctctttgttaacataagtaccctgaactttttttcattaaacatatttcaaaaagatttttcggatctttttcagagagcggcataagatataaaacacagggaaagacataaattccacaataaatataatcatgaaaatgtttacattttgagtgccgatctattataataaacttcagatagactctcgggaggggataaggaatgaatcgcatgttccgggtgttaggattttggacggggatatttgcagtcatgttttttttagggggcatgaaagacgcttcacttttgttttttggacagacgatctttttcgtatttctttcttatttgaatctgactgagcggatgtatatttatattttcggagcttacttaaccgtatttttcgccggatttacatattactctatttttattatgacaccgggcggcggaacccactgacagaaaaagacagaccgattatggtctgtcttttttcatttacagtgaaaaaccattgataaacgggtttcgctcctgctctgtctgaatatccgtttccggcccgtgcccgcttaacacaagtgtatgtccgggaagcgtgagcagtttttgatgaatggaatcaagcaatacgtcctgacttccgccgtgtaaatcagttcggccgatgcctccctgaaagagcacatcacctgaaatcaccagatccgcgtccttcacataataagaaacgcttcccggtgaatgtcccggcgtaaacaatgtctccaaatggaaaggcccgatgtccaatatgccgtcgccttcaatcagccgttcggcgggccgtgccgttacggcgatgccccgcaatatgcctgatccgtttaaggaagagtcctccagccacttttcttcatttttgtgaagatatacgggaacatcccatctgtctcttacttcgtcaagcgcgccgatatggtcaaaatgggcgtgcgtcagtaagatggccagcggcttcagattgttttcttttatgtaattgttgattttgtccgcttctccgcccggatcaaaaataagacaggactgatcctcactgacaagaaaatacgcgtttgcctgaatcggaccggccggcattcgtctccatttcactttcatcacctctttatgtatatgcccttattatgaaggttttctgcggaagattcaatgaatgcggccgggaaaacgctatcgacaaacaaaatgaaaacggttaaaatgaaatggaaagattttcaggttccaatgacaaaggaggagcatgatgttacttgttgtaatcttcggccttgtcgcattattagctgtattaggagtcctgcgggctgtcagacagagaaatatcctgggatttttgttagccgccgccacgctgggcgtgtttggctggtttaccgtaatgaccgttgtaaccagcggctatccgactgcacattaaaagcctgtatccattggatacaggcttattttttattgctgcaaatgtttgctgacacttttgattttgctctccagcgtcgtttctttatcacgtctgtcatcaatgcggatatttgtcgccactctgtgcagccctttttggaacggggcttcgtgaatgtcctgaatgactgcgaataagtcgctcagctcaccttcaatcaaagtgttcatcggcgtgagctgaaatttgattttgccggcagctttgtaaccctccaaaatgttttgcacatccgctacatactcactgacgctcggtgtttttgttccgatcggaatgattgtcacatctgcaattgccatttgattcaaactcctttttcatttgttatgattggttctgtcatgcctgttttcagtgaaatcagacggtcatacgtaaagccgtataaagcgtattccccgttcggagagatctgaatcggctccatttccgtgtttttgagcaccgtccgctcccgttcatctcctaagtcaaagctgatcagattgtaagagcggccttcaggcttaaatatgtaaaaccgcttgtgtgtctgatcgtaatcatattccatcggcgcaaagctctgatacttttcttggagaggaaagcggtgcgtcacggatgccggcttttggaaaaggaactcgccgtctccgtccgattgatccgtttgtctgacggcaatcgtcatgcccgggcgggaatcggcccagatgacgtgatgaagcactcttttttcttttttcgtctgcaagtcataagaatataaaggaccctcttcctccgtttttccttgcttgatatattggaattcatcagtggaggtccaatggacaaaaggggcctgaacgggactcttttttaaaatgccgttgttcatatcggccgtataggcagtgaagtcccatgtttcagtaaaaacggtaatcatcatttgatacgggtcatacggattccaagccgtctccagctcataagagttaaaggctttgtgataaagtcttttcccctgcttgttcataagcacaagctcagtctgaccgctgcttgtcacctgtacgagaatcagctgttttttccggctgatctttacattgacaatatggccctttgtttcatagagccgttcggattttccgctgaaaagatcatatttcatcagctgatgatgtgctgtatacagaatcgttctgttatccagccatccttccgttttctccgcttcctttttactgagcggaacgattttctgttctgccgattttgccgaaacgcctgtgtcttgctgctgatgagatggttcacaggacgctaaacacagaacgaatgcggacagcagaacacaaaccaagtatctcaccagccttccctccattcttttctattgtcccatatttgtttatgtaaacaaatgagaaatttcacagatgtctcaaaaaacaagcgacctccacaaaataccttccgtcgcttgataaatatcagcaaactgatgaaaaggcaaagggttttttcccttcccgagctcaatggtatagccctcttttccatactgctgtataaaccaatccctaaaaccggcatggctgtcaatggttttaacgccttgatagcggtttccgcttatcgcttcaaactcccgaatcatccgggatgattgctccggttcacatccttcgtacccccaataaatctcttctccctgcgtatgaagagcgatcagccggtcaggcggctgttccgttatcagccggtgcatcgcctgcgcctccggttcagtgagcggcgccgtccccggaaaatcacggtgtgaaggggctttcggtttgcgcctctgttcaatatcccaattggatgggaaatgtttatttaaatccacaccgtttatattcgccttccattcgcggaaatccgggcggtgttcatttaatcgattaagaaattcatttttttctgataaatcttcacatccgtaaagtacgagatcaacaccgtcgggatttacgagcggaacgaatgacaatgatgtcaggctgaatatatcaagcgcagagtgcccgaaaacggttttattttcgcataatcccgcgcaatattctttacaccatttaagcgcgaccgaggtggtgatccattcattggcatgaaatgaggcgtttacatggacttttctttcggccgtatccgcacctattttcagctcataaagcggctttcccaatacggaactgccgattttacggcacgtgacaaacggaaagacatccgttattttctcaatttcttcataaaccgattgggacccgtacaccttttcttccttcacccattgatcagtggaaagagtcctttcacagtgccggatgtatcgcgaaagcccgctcagcgtctcaagcggcggaccctctgactgcccgctcacggcaaagccggggcaaaataattcatcgttttccgccgttttatcagcggctttcaacagtttttcatcaattgaaagcacctttgcaatatctttcatatgctgtttcaattcaggtttgacacgaattcccgccatgttcatcccccttttttaaaaactatatgacaggggagataaaaaaagaaagccgcccgcgatatgggcaggcagactttcttcagcagttttgatgtttgagccattcatttttggcaatccacgccccgccgatgactccggcgtcatttccaagtgccgcaatcgaaatatccgccgcttccgcagaacgcgggaatgcggtgattttgaaagtctcttccacttttgaccgcaggatttcacccgctttagacacgcctccgccgagcacgattttcgtcggattcatggcgcttgccagatttccgagcacgaggcctaaatgttttgcgacataatcgacgacttcaagcgctgtcttatcctgctgtttagccgcttcgaacacgtcacgtgccgtcagatcatccacttgtaagagcgaagagtcggaaaccgccgcaagcttttctttcgcgatgcggacgatgccggttgcggacgcaatcgtttcgatgcagccggattttccgcagttgcacggagctcctccttccggaatactgcaaatatgaccgatttctccgccggccccgtttttaccgtgaacgatttctccgttgacgatgatgcctccgccgactccggttccgagcgtcactaaaatgacatctttggccccgtcacctgcacccttccacatttctccgagcgccgcgatattggcatcgttttcaatgacggccggaatacccgtttccgcctcgagatggtctttcagcggatagtttttccaccccatatttgtcgtctcatagaccactcccgtcgccatttccacgggtccgggcgctcccattccgatccattttacgatccgtttcggcttgttcagttcttccagcttctgatcaagcgctttggcgatcgtgaccgtaattgtgtttcctgatttatcggtcggaacttcccatttatgctgaatttcaccgtacatgttgatgaaggccagcttgatggttgtcccgccaagatcaatccccgcaaaccatgtatcttccataataatctccttttcttattaaaatcctgctttgttatctgcctttgatccgctccgattctctctgaagaacaccggcggctttttgccataattctctttcaatcacgtttgacaagtacatttcctttaattcatctttcataaagtctatttcggcttgtctgtcaccgaaataaacgatatgtccgaatgacttaaacagctgctgcacgtcataaaatgaattcatctgcttcaccatttctattcttcttagtataagcgtatttcatcactgatccgggcgtcaagcaaaaaacgattggagaaaatatccttgtattattttcataaattgtatattcacaattgtaaaaaaacactcatttaagcgtttttctgttacaatactttcgtgcccaaaagcacaaaaggattaaagtttgatggggtgttgttttgaaacaagaaaaaaggctgacgttcatctcagccatcagtttatttgtcttgatgttagcagtcattatgtcctgcctgtttttctttcatacagagccgcatatgccgctgttcttttgcgtcattattctgtctctggcaggtttgtggctcggtttctcgtgggagagtcttgaaaaaggaattgtcagcggattgaaaaacggtgtgcagccgattatcgtactggctttgatcggtatgctgatcggcgcctggatgtacagcggcgccattcccaccgtcaccgtttacgctttgtcaattatacagccgagtcagctgcttttgaccgcattattttcctgcatgattatcagcacgcttgtcggctcaagtctgacaactgtcagtacaatcggcgtcgcgctgttaggggtagcaagcgcggcgggagttccgctcgaatggacggcgggagcagtcatttgcggggcttgtttcggtgataaaatgtcaccgatgtccgacacgacgaattttgccgccggaatcggcgaaattccgatttttaagcatattcgccatatgatgggcactaccgttccggcactgctgatcacgattgttcttttttatattctcggttcatcggtttcaataaatgccgcttcaacgcaaaatattgaggcggtcatttccggaatgaaagaggccgtgcacattacgccttggtcgcttctttcacctctgttggtgatcattttagctgtgagacggatttccgtgattccggtgcttaccgccggtattatttccgcagggcttctgactgctgtttttattcctgacagcagcattcaaggatttatatccgccctgcaaagcgggacggcgtttaaaaccggcgaccaggctgtggccagcattatcaacagaggcgggctccaatcgatgatgggatcagtctctctgatcatgatcgcctttgcgctcggcggcctgatggaaaaaacgggccttatcgcggcgctgcttcaaggattgataaaaggcgtgcatacgaaaggacgtcttgtcatggcgaccgtcttctcaagtataggcgtaaaccttgcgacaggtgagcagtatttgtcgatcttaattccgggtcaatcttataaacctttatatgacaagctcagcattaagcggattcaccttgcgcggtcgcttgaggacggcggaacattgatcaacccgctgattccctggggagtaagcggcgcttttatggcaagcgcactaggggtttccgtcatcgactacctgccgtttacctttttcctgtacatttctcctatgatctcaattctgctcggtttcctgaaaaaaagctgacaatacgagaaaacctgccgttttttaccggcaggttttcttatgcaaaaaatcccgctgaaaaacgggatttgtttaaaatgcctgctgaatgaatttgtttctgataaacggtatttttaaaaagaaatgaatgaatgaccgtctgatccccggctggctgagcacgctgttcatcagacggtagcggttttggtaaacggctaaaacagatacggcgcataatgagtagatcaacaattttttcatcttatccctcctgcccctatcgtttgtcaaacagcgagaattattccggtgcaagaagtttttatgcgattaagcgatggtttcagattcagtcacgatcatatcgaccggaatatcgtggggcatgcggggaatgcggtctgtcagctggcagtcaaagagaagcgacacggtacggcctttataaccggagaggtaccgatcataatatcctccgccgtatccgattctgaagccttcccggtcaaaagccacgccgggcacaatcacaaggtcaatgtcatttggggcggctttttccgtctggctctcgatcggttcactgaggcccgcatatacggtttccagctgatcatacgcagaaaatgtacggaactccatcgctcccgtctgcggaaagcattttgggatacagacttgttttttctctttccaggcctgttcaataatcggccgtgtcggaatttccaggcgtgtcgagatggtaacggcgatcacgcgggcctgtttccattcttttaaagaaaacagcgtttcacgcatgctgcggcattttttctcccattcactttctgtcatgtcagaaagctttgctttgatagcggttctgatttgtgctttcacgtttctcaaacctccctgaaagacaaaaaagccagaactttattgaaagctccagctttttccgctgttttaaacagcttattttgtttcacggtgtaacgtagattttttatcacgtgggcaatattttttaaattcaacgcggtccggattgttgcgtttgttctttttagaaatatagttacgctcaccacattcagtgcaagccaaagtaatattaacgcgcattattttccctccaaactaaatatcatttacttattcagacttatatataataccactataatggacggaatgctagagtgatttacatgaaatgttgtttaagtgcagaaaacatcagtttatgcttctgatcctctgaatgagcttgcgccaggtgaagggaaaatatgacgaaacaggacaaaaaaggactttctgatgcgaaatctatagagaaataaccgtttgctccccgaataaaaaagatttcccgacaaaattccgtttttttctctatttcctttagaatggcggcgttttatggtataaaaaagaagggcaaattaataatagaaggtgatgaaacgtggaaattgctattattgcgttgtttatcgtcagtatagcgcttattgcattctcatattctcaaagagatccgatgaaagacgtggaacaggagcttgaaacgcttcagctttccgccatgcaggaaatttacaagttgaaaaagaaaatgacggtgcttgaagaagaattgctggaaaccaacctcgtgatccgcaaagccaaaagcagcggcattaaccaaaaaatcgccaaacaaatcatttcaaaatataacaacggaatgtctgcggaagccatcgcaaaagcggagcacgtgtctgtcgaggacgtcaataccattattaaagataatgagaaggtgctcgtatgacaaaacggggcattcaggcttttgcagcaggcatgattttagcgacggccgttctcgccgctgtcttctatttgactgaccatgaccaggcagccgccgttaaaaccgaaaaaacagcattgacagaaaaagaagtaaacagctacctcgacgatcagcaaaaagtctccgtcaaccgggatgactatcaaaaactgcttgattctaaagaaaaatcgttaaacaacgaccaaaacacagacgccaaaaagaaaaaagtaacatacaaactgacgattaaagacggaatgagcactgctgatgtgtcatccattcttgaaaaagaagggattattccttcagcgaaggactttaatgattacgtcattgacgcaggctaccataaagaaatccgcgccggccatttcaaagtcgactcagatatgagctttaaaaaaatcgtcaaaacattaacccgctaaaaaagcttgcaggcatcgtccattcagatggatacggccggcaggcttttttaatagggagtataaaacggacccggtcaatggccgggtccgtttttttcatccgaattttccggtgatataatcatgtgttttttgatgatccggctgagaaaatattttgcccgtatcgccccactctaccagttcgcccatatagaaaaacgcggtttgatcagagaccctcgcagcctgctgcatgttgtgcgtcacaatgacgattgtatacttttctttcaatgtcaaaatcagctcttctattttccgcgtggacacgggatcaagagcggacgtcggttcatccatcagaaggacgtccggttttgtggcgagcgcccttgcgatgcacagccgctgctgctgaccgcctgacagtgaaagcgcctgctggtgaaggcgatctttcacttcatcccagagcgcagctgcctttaaagattcctcggcgatttcaagcagtttctttttatttttttcgccgtgaattctcggaccatacacgacattctcaaatattgactggggaaacggattgcctttttgaaacaccataccgatctgttttcttaattctgccgcatccgtcttttctttcagcagattgcgcccgttatagatcatgtcgcctgtcactttgacattcggggtcatttgcagcattaagtttaatgtcttaataaaagtggatttcccgcagccggacggaccgatgatcgcagttaccttccgctcctcaaaaccgatcgtaatgtcttttaaagcctggtgggctccgtaccatacgttcatgccgtgaatatcaaataaatcctgtgtgtgcaccgcttccttcacaaggctcacagtccttccccctatccgaactttccgttaatgtagtcatctgtcttttgcgctttaggactcgtgaaaatttgttctgtctgcccgtattccaccacttccccgtttaaaaagaaagccgttcggtcagacaccctaagtgcctgctgcatgttatgcgtaacaataataatcgaataatcttttttcagttctgtcaaaagcgtctcgattctggcgtttgaaatagggtccagagctgaggccggttcatctaaaagtagcacggcaggtttcatcgcaagcgtacgggcgatacaaagacgctgctgctggccgcctgataacgaaagagccgatgaatgaagccggtctttgacttcatcccaaagcgccgccttcgttaagctttcctcgaccgcatcatccaaaacggctttcctgcgttcccccgcatacttcagcgcatgtgtgatgttattgtaaatggatttcgggaacggattcggtttttgaaacaccataccgatctcccgtctgagagacacgacattaatcgcttcccccaaaatattcagcccttcataaaggatctctccctcgcttcttgcaaaaggaatggcatcgttcattctgttaatctgtctcaaaaatgttgatttcccgcagccggagggaccgatcagagccgtcaccgcatgtttttcaatatccatgtttacatctttaaccgcttgtttgtcaccgtaataaattgataaatgcttcacttccaaaattgaagactccggcgaacgctttgtctgttccgcttgttccctgatgatgtgatcaatcatgttttcgcctctttccgattaatttgccgtaagctttttataaatgacagatccgagccatcttgcacaaaggttaaacaagagcaccgaaatcaccagcaccgccgagccgccgtttgcaatcgcttcggcgtcagggatgattccctgcgtattgacactccatatatgaaccgccagcgtctcagccggcctgaaaatgttgaaaggagatgattcagaaaacgggttcaaatccgtaaaattcagccgcggcgttgtcagtcccgctgtaaataacaatgcggccgcttctccgaatactcttcctgatgcgagaatggctccggttaaaatcgaaggaatcgcactcggaatcagcaccgttttgacggtatgccatctcgatacgcctaaagcgagagaagcttctttcagctccttaggaactgcagtgagcgcgccttctgtcacccggaccataacgggaaggttaaagaccgttaatgcgagcgcgcctccgataatcgtgtagccccatccggtcaggtttacaaacatcagcatgccgaacatcccgatgacaatggacggaagcgaagacagaacctcaatacacgttctgataaaatcagtgattttattttggggcgcatattcagccataaagacgccgccccccacaccaagcggtatcgtgatcagcatggtgataaacagaatgtaaaaggaattaaaaagctgatcccgtattccgccgcctgacgcaatggcgctcgattttgacgtaagaaaatgcaaggagatttcagagacgccgtgaataagaatgtacaaaaacaatcctgccaaaattgccgcaattacagcggcgcataacccgaatacaccggtggccaatttatccgttattttccggttcattacactttcctcctagacgacaaatagcgtatgagcaatataaacagaaacgacatgatgagaagaacaagccccatagaccataacgtattattttcaatactgccgtatgtggtatggcccatgtttaacgtaataatcgtcgttaatgttcccgccgtatcaagcaggctttccggcagaagctttgtatttccgataaccatctgtacggcgagtgcttctccaaacgctcttgccatcccgagcacgacagcggtcagcaatgtcggaaacgccgccgggataagcacctttctgattgtctgccacctcgtcgcaccaagcgcatatgaaccgtcgcgaaggtgtttcggaagtgacgcaagcgcatcagcggaaatcgatgtaacagtcggcagaatcattaccgagagtacgatcgtccccgccagaaggctgtgacccgttccgcttgatttaaaagagccgataaacggaaccaatactgtaagacctatgaatccataaacgacggacggaatgccgacaagcagctcaattaccggctgcagcaccttttttccccaagtcggcgcaatttccgtcataaacacggcacccgcaataccgaggggcgctgcgatcagagcggacagaaccgtgaccgcaaatgatccgaaaataaaaggcagcgcgccgaactcaggttttgcctgggttggattccaattcagacttgttaagaactcaatcgggcttacaccatttacaaaaaaagattgcagcccctttatgccgagaaaaattgtgatcgccgctgatgccgcaatgataatcgcggcacacacagacacaatcacccttccgcggacttcatccatttgcctgttttgttttgagcttattaagcgttcgcttacagactctttttctctgtgatttatcatttgtttacactcctataaagaagaagaggcggggagcccgccctcccctcagctttgcttgccgtttgcgtcacgtgtgactttcatatcagagatcggaatgtagccttgatcttttacgatacttttctgtacttcatcgctgttcatatagtcaagaaacatttttgtaaggcctgatgcttcacctttcgtataagagtgctcgtaagcccaaatcggatactcgcctgtgacgacgtttttctcttccggtttgatgcctccgatcgataaaggcgttactttgtcatcgtttatataagagaatgccagataaccgatagctcccggcgtttccgcaatgatttttttgactgtattggaggaatcctctgtgatgccctcagcaggatctgctccgtcaagcgcgtatttgacgaacgtagcgcgtgttcctgatgaatcaggacggttcacgagtgtaattttttgatctttaccgccaagctctttccagtttttaatttttcctgtaaagacgtctgtcagctgttttttggttatatcctttacgcccgcaccggggttgaccgcagccgccatcgccactaccgctactcggtggtcttttagggctttcgcatcaatgccttctttttcttcagcaaagacatctgagttgccgatttgcactgccccttcagacacttgcgaaagacctgttcctgaaccccccgcttgcacctgcacatcagcatccggatgtttttccataaacttttccgccgctgccagtactaacggctgcatggctgatgaaccagaaatggttaaagaacctgatgcttttttatcctcacttgcagattgactgtctgtcttgccgctttcctttgcatttccgcatgctgcagcaacaatcataacagcagccatcagaagcataagcatccatttgttttttttcatttcctgaattccccctgcatttaatgtgtaatttgtcctacacgtatagagtaaagggttcttgtaaaatgcgtataaatcaagtgttaaggttttgtaaatccggatgtttttttgtataaaaaaaacgctcacaagttgtgagcgtttttctgttagttgtttgtattgccgttttcagcgtcttcctgaattttatcttcgtttttctgcttcgtattattatcttcttgtttctttttcagctcaaagtatttgtccagagctgcttccccgatgtcattagttattgaatacctgtcattgtaattttcataagcccatggaaccactaccgaaatagcaacttcaggatgatctgcaggagcataagccaccaaagttgtgttataagtagaagcaccagttcttgattttataggcccatcatagaaagcttgtgctgttccagttttaccggcagggtgataacttttattagcaaaatttgctctcgcagtcccttgagctccattcataacaagtttaaagccttgctgaacacgttcaatttcactttccgtcatatcaagacggttcatcacttccggattaacagattcaacgacggccccgatacctttttttgaaggttttcttacttctttcacgacttggggcttcatacgatagccgccattagcaatggtcgatacatactgagccatttgaagcggagtgtatgtgtcatattggccgatcgcaaaatcaagcaagaaacctgactgtcttttagttcccacatatcctgtagcttcgttaggcagatcaattcctgtttttacccctaaaccgaattcactgaagtaataacgaaatttatcaaatgcgctgtaatcaagcggaagtggatgtcctgatatatatttacccttaccaattgcaatcgcagttttgaacatataaacgttagatgaacgctcaagtgcagttaaatcatttatcggccccattacacttaccgattttttaggaggagagcctttaatatttaaaacttcatccgtaaatatatttccgatttttatagcacctgtttgataacctgttaacaatgttgccccttttacagctgagcccatgttataagaggaagtcattgttcctagtgcataatcatcaattttatatttgccgcctgcttgtttaatctgtttacccgccattgtaagcacttctccattacggggatccatcattacgacaaatgctctatcaagcaactgtgtactcggtcttgcctttgcagcccttaaatttttctcaataattttttcaacgtctttttgcaattcggtatctatagtgagcactaaatcatccccggctttaccttttgaaaccgtttctgtatctgttacgtttccagaggaatctgtcacatttctcactttctctttttggccctgcagcagattttcatattgatactctaaataactttttcctactctgtcattcctgctgtagccgagtgacaaataatgctcaagaagatttgaagggagtccctcattggagctcgagacactgccgagaactgattttaacaaccctttatttggataagaccgttcccagtcagacgtcacgtcaactcccggcagttcatccaaatgttcgctgacgacggccatttcttttgccgacaccccttcatttttgatgtattgaggcgtcagtgagtagcctgaatccatctgccttttgatcgcaaggatctgcatgtcttttgaagtgagctcattcagctgtttgtctgtgatgcgtttcagttgaagctgatataaatcatcttcagacagttttttgtcttcagctttttgcttttcttcggccgtaatcagttttttcgcttcatcaggcctggttaacatccaatagtcttttttatcccgctcagtcacctttttggtgcttaccttaatcatacccgacagtttttttgcgatttttaaacgctgcgcctgggtggttgaggctgaacgtgtatatgtaatcgcatttaatgctttattcgttacgatgggatttaggttccggtcgtatattttccctctcggaaccgccgtgctgacatcagactcctcctgcttattagcggcgtttttataatcatcaccctgaacgatctgcttgatgccaagctcgacgataatccaagtgaaaataagaaacgcggccaaaaacaaaaaattaagccggatcggcagtgattttttcttttctttgtttacagctattttctttttatttctcctcatgacatcaccttttcttatttacagaaagaaatgacaccttctgttcaggtgccatttttcattctaaaggttttttcgatatttttctacagataacccttttatctttctccttttataaaattcggttccgccgcctgtttttgtcggtcttcttctactgtttcatcagaagtttccgtatccagtttgatgtcttttataaagtaataaatcagcggatggccggctccgagcagcacgagcgccgccggtattcccactttttccttgaataatgtaacgattacaaggaaacaaaggatggaaacgatccggcccgcatttaaaaataactccctgagcacaatgtattcaattctggcttttctggcaagccgcgcccggcctatcacatcatatgtaagcgagacatacggcacgagcagaactggatagccgatcgcaataaacactccgtacaaaaggagcgtcgtgaagctcattttaaaaattatgagaaacagggcgccgtacaagatcaatccgccgataagaatcgcctttttccgcgctctttttttaatgagccttgatgcaaaataataggcaaaaaaagaaaccgcggaattgacgagaccgaatgttccgagcgccagctcactgtttgtcgcaatgaatacaaatacgctgattaaaaaaacaaaaatcccttctctcaagccttgaaaaaagtgcgcgttggtaatccggcgccaattcagattcgtgtggcgctcatcaaaaacttttttcagcataaaccggcctttcgactccctccgcttcagaaaaaagctcatgaccacggcaagggcaaataagccgagcgacaggctgaaaatgattgtataacccgtattgttttcaagtcttgaaatgacatatccggccacaatcggaccgatcatgcccgccgatgaagacaaaatgcctaaaaacccgttaaaaaaatctctcgtttccggttccgtgatttcgaaagtcagcacattaaaagccagccagtaaaagccgtatccaactccgagcacggcccctatcaaaacgagacgggaagccgcagtttctccggcaagcagcacacttaaataaaaagcggccaaaaagataacgccgaaccttagaataaacaccctgtcaatttttttagccagccggcccgccagcagaaaggtaaccggctgcatcgtcacgaccgacaaattgtatatggccaaatcaataaattttcccgactgcttccacaaatacacgttgacaaatgtatttgacagcgcgatgcccaatgagtaaaggccgccaatcgtcaataacagcagcagccctttatttatttcgatgtcgccgataattttttttattttgctcatcattgactcccctttactacacattagtttgtctcactcaaactgagatatgtaaaaggaatcaaagtcaataaaaaaacaaggcctcccgcgggagaccttgtgatcattcaactcaattattttgcttcgctgtaaagacgggcaacttcatcccagttcacaacattccagaaagctgaaatgtaatcaggacggcggttttggtagttcagatagtacgcgtgctcccaaacatcaagaccgagaacaggtgttttaccttctgaaagcggtgaatcttggtttggcgtgcttgtaatttcaagtttgccgttgtttacaacgagccaagcccagcctgaaccgaaacggcctgcagctgctgcggcgaatttttctttaaattgatcgaagcttccgaacgtgcttttgatctcttcagcaagctcaccagtcggttcgcctccgccgttcggagataaaagagtccagaataaagagtggtttgcatgtccgccgccattgttgcggactgccgtgcggatgtcctccggcactgcgttcaaatcagcaacaagctcatctacagatttctctgcaagcgctgatccttcgatcgctttgttgaggtttgtcacgtatgtgttatggtgcttcgtatggtgaatcgtcatcgtttccttatcgatatgaggttctaaagcatcataagcgtaaggcaattctggaagtttgtaagccataattttttcctcctttaaatatatgtactgaaatgccgcttaacgcgaacttttctaatctcaatgtaacaaaagaaagcgtggtaatcaatgaaaaagctcacaatccggcgattccagcagacatattacactttatccgttcacggccgaaattaaacctttctaactaaagcaccgtccataagaaatatccgatcataaagagctgaatgacgccttttgccgccacgcttgttaaaaagccgattaacgagccgagccccacttttgccgcggacttgatatccttttgatgaacaaacacctcagcgcagacagcaccgataaacgggcctaatataatgcctgccacgggaataacgaagggcccaatcaataatccgatcgtgcttccccagattgccgccctgcttcctccgtaccttttaacgccaagtaaatttgacacataatcagctgcgaataaaaccgccgcaaataccgcctcaatgagccaaaacaggtaagaataaggactgaaggaaaacaaaaatccgtagagaagaaaaccggccacaataaaaataacgcttggaatcaccggatatacaagcccgataaaagcaatgacgaagaccgcaatgataatcagccaatacaaaacactcatgacaaaaacaccctcctttgttttgcgggagatcaccgcttcccactttatcttattatgtatgattccttatcaccgctttaaatactctcacttgtgttcatcccctgtgaacgatacaataagcaacatataccagtttaggctaggaagtgaagatgttgaacatatttacggctttattgaaaagtacatactctccggcagatattgcaaaaacacggtttcaggggataggaaaagcgatcctttatgtctttttgctgtctgtcctttttacgctgccaagcgcttattacctttgctccggcaccgtaaactcaatgaacggtttcaaaaccgtgttaaagaaagatttccctgatttcagcatttcaaacggagaattgcagacgaaagcgtccgcctctaaggaaacggaagcgaacgggttcgtcatcgtgtttgatccgacagatgcttacggcgctaaacaaatagcggcgaaacaaaatgcgatcggcattttgaaaaataaaatggtgcttgctgtagacggacaagcgacagaaatgaattattcgctgatgccagctgatatcacaaaaaaagaaatcatatcagcattaaaccaaaataaaacgatgatcgtcaccgtcctgtccgttttgctgttcatcatgacagcggccggaaaatttattgaagtatcatttctcgccgtcatcggcctgatattgaaaaatgcgcaaagaaagacattaaattaccagcagctctggaagctttcggcttattccattacactttcgaccatattctttacaatcatgcgcgcgcttgttattacagtgccgagtgaatttttagtgaattggtttgtaaactttatcatccttttcctcgtcttaaaagagataccgccaagaaaaacagctgtgtaacaaagactgcccccggcggtcttcttttttgtcatgaacaaaatgggacaagcatacaatgaagtaaaaatgtatgcgggaggcggttggaatgaagcggcttacttttgtattcggcagtttatttgtgatattcattatcttttacgatcttaaaatcggcacgatcccttctcaagaccttccagcatacgcagcggcggcacagacagcccgacaggaatcttcatacagaacggttacggtcaaaaaaggcgatacggtgatgtcgatagtcggcgcacataaagcgccagatgatattgcacaagattttgaagcgctgaatccgaatgtaaaagcaaatgccattcaggcaggcaccgcctataaattccccgtctaccgcaattaaacgttaatttcttgtcagttcggcaaatacactgttacaatataacatgtaaatagaagttgcctgacatgtaaaaggctcagcctgcaaaagcggtaactacaattaaggagcgattgacaagtgagtgaaatcacacatcgtacaaaaacgcgtcccgtcaaagtgggacctttaacaataggcggaaataacgaagtcgtcattcagagtatgacgacgaccaaaacacacgacgtagaagcaacagttgcggaaatcaaccgtttagccgaagccggctgccaaattgtccgggtggcatgtccggacgaacgcgccgctaacgcgattgccgacatcaaaaaacaaatttccatccctctcgttgtcgatattcattttgactacaagcttgcattaaaagcaattgagggcggggccgacaaaatcagaatcaacccgggaaacatcggccgccgcgaaaaagtggaagccgtcgtaaaagcagcgaaagaaaaaggaattccgatccggatcggcgtaaacgcgggttctttggaaaaacgcattttagaaaaatacggctatccgactgctgacggaatggttgagagtgcgcttcatcatatcaaaatcctggaagaccttgactttcacgacatcatcgtcagcatgaaagcgtctgacgtcaatctagccatagaagcatacgaaaaagcatcaaaagcatttgattatccgctccacctcggaattacagaatcgggcacgctgtttgccggaacggtaaaaagcgcggccggactcggagcgattttaagcaaaggaatcggaaacacgctccggatctctctgagcgccgacccggttgaagaagtaaaagtagccagagaactgctgaaatcattcggtcttgcttcaaacgcggctacgcttatttcatgcccgacatgcggacggatcgaaattgatctcatcagcatcgcaaatgaagtggaagaatacatttctaaagtcaaagcgccgattaaagtagccgttctcggatgtgccgttaacggaccgggcgaagcaagagaagctgatatcgggattgccggcgcgcgcggcgaaggacttcttttccgcaaaggccaaatcgtccgcaaagtccctgaagaaaccatggtcgaagagctgaaaaaagaaatcgacaagctggcagaagaacactacgcaaagcttgaagcggaaaaagcaaaagcagaacaagaaacacaaaaagcttgacggatattccgccaagctttttttgcgttgtgttaaaaaaacggtgtaatgaagatgccgagcacaagggaaacaataccgattcccatcgcccatccgcctaaagcgcctgctcctcttcttctggcgatatagccgacgataatgccgcatgtccctaataaaacagggagcacaaacagggaaatgatagaaatagccaatgctgcataccctatcccccggccttcacttactccgtcccgattatcatcacggtctgctgcccggtcagaagcacgatatggctctgagatttcggccgctgtttcttctgaataaacatcacgcgtgatatcggttccttccgatccatgatcaacgtagtagtcgttgccttttcgattttcgtaatcgtatgccaccttcaattccccctttttcttttatgaaaggagcttttttagtttccgcgttttttacggattcatgtttgctaaacttttctggtattgttaattgtttatgttacacttgaagggatgaatttataggagtgtggacatgttacggttaggtatagatattgacggcacagttacggcacaggatacatttgtcccttatttaaaccgctcatttcatctttccattaccttggatgatatgactgattatgatctgacgaagcttttgaacattacagacgaggaattttgggaatggatgaacgttcatgaagcagccatatataaagaagcgaagctcgcagaatttgccaagcaggcactggacggactgaaagaagagcaccgtctgatctacattacggcaagacgcggccacttagaagatgttacgctggactggtttgcaaaccgggacattcattacgatcacattgagcttgtcggaggccatcacaaagtggaagccgtcaaaaaacacggcattgatttatttttcgaagatcaccacggcaatgcgacaatgatcgcaaaagaagcaggcattccggttatcctttttaactccccatataatcagctccccatcgattccaatattatcagggtgcagaattggcttgaagccgtcgcctggattaataaaaacaaacatagctttcagcatgtcaaaagctgaaaaaacctcctgtataagcaggaggttttttatcggcacgccggacaggtgccgtaaatttcaaacttatggccgctgatttcatacccttccaaatcatcgtgcagcttatccatcggacaggactcaatttccttcgttttcccgcaggttaaacagataaaatggtgatgatgatgggtataagagcatgtaaaacgaaacagtttttctccggaaagctccgtcgtttccaaaatgccgagttcttcatataacgaaagatttctgtatatggtatcaaagctcagacccggatagtcgtcatttaatgcggcaagcacgtttttggcggtcagatatttatcagaatcagcaaaaagctgcagcatgtcttctcgcttactcgtatatttataccctttttctttcagcaggttcaacgcttcttgtacgttcatgaggacctcccctttacaacacggtatcgctccaaaaagaaaatggcagctgtctgaacagcaggccattttcttatgatgtatcaaattatacctataaaatgatgaaaagtaaatgaaagcctagtgaatcgcggttttgaacttaccgcccctcgtttcatgggtattcatgatcgtaataaaggcgtttttatcaatttcaaacacaatggatttcaatttagtcacttcaagccttgtcacgaccgcgtaaatgacttctttggtttcatccgtatatccgccttttccctgaagcttagtggttccccgtccaagccggtgcaatatagcatctgagatctcagcatattgctctgcaacaataatgaccgcttttgtttcatcaagcccctggatgacggcgtcaatcgttttcatggcaatataataagtcatgaaagaatacattgcctgctccggaccgaacacaaaaccggcccaaatgaaaataaacacattgatgagcataacgaattccccgactgaaaagggcagctttttcgtgagaaggataccgaggatttcagtaccgtccatcgagcctccgtttcggatgacaaggcctaccccgaaaccgagcaaaagccccccgaataccgtcgccaaaataggctgggtcgtaatggcctccacatggtgcaatgaggattcaatcagcgctaaaccgacgattccgataacagtagagatgagaaatgtttttccgatatatttatatccgaaaatcataaatggaatgttgagtaacacaacgaataaggcaaaattgaggaggggattggacataaagaggtggtctaaaattaatgaaacaccgataatgcctccgtcgataaaattattagggaccagaaacaattcaatacttacggcggctgaacccgccccgatcagaatcataatgaccctgaagataaagtgtaaaaatgattctcttttatgctgtttatttggggtcataaaatctcctttcctataataactattttaaacagtaagcaactttattttaccattaaaagctgtaacattttaatgatctgctcaatacattatgtctaaagaggtgaaagtatcgatgattttaatacaaagaattattttgcagcggctcaatcaagtcactgcggacgatctgctgaaatattccaagcaatacggaatcagcattacaagaagtcaagcggctgaggtagcggctctgatgcacggaaaaaacatcaatatttttgatgaacaggagcggctgcgcctcctgaaaaaagtggaaacgataacctcaaaagaaacggcgcggaaagttgacgaacttttcaatcaattctcaggataagaaaggagggacacccgcccctcctttctttcttattgagctgatattttttcaagaagctccttatcaaactgcttttctttcagcatttcgatttcaaaacggtacggcggcttcttatttttcttgtcttcgcctacatacggtgtttcgaggattttcggaatatcggcaagctgctcgtgatgaacgatgtactgcagagcgtcaaaaccgatctctccgaacccgatattttcatggcggtctttccgggcgcctttgatatttttactgtcgttcacatgaaggacttttatccgatcgatgccgacgattttatcaaactcgttaagaacaccgtcaaaatcattagcgacatcatacccggcgtcatgggtgtggcaagtgtcaaagcagacggatagatgttcattatgcgtgactcccgcaatgatctcggccagctcttcaaagcttctcccgcattctgatcctttgcccgccattgtctccagcgcaatctgcacgttttgctcgggaacaatcacttcgtttaaaccttcaataatttttttgatgcccgtctcagccccggctccgacatgcgctcctggatgaagcacgatctgtttcgcgccgatcgctgccgttctttcaatttcagaacgcagaaaatcaacgcccagctcaaacgttgccggatttgtcgtatttccgatgttaatgatgtacggcgcatgcacgacaatctcgtcgatgccgttttccttcatatgggcgcggcccgcttcgatattcaagtcttcaatttttttgcggcgcgtgttttggggagcgcccgtatagatcataaatgtattcgccccgtacgaaacagcttccttgcttgcggcaaggagcatatgttttccgctcattgagacgtgtgaacctattttcagcaacccgattcccctactttcctttgttagatttgtttcttctctgctttctttttatcttttccatttcgtagctcattttctttttatagcccggcttcacttttttcggttttttcacgaggcgcttcgccatttggtcggcctcattctccgattttttgcgttttttgcggcggtggcggtcatcgcctttcttccattcgccgtttacaagctccgcatagtcaaacacaatgcccatcttttcgagtcttacgagcgcatcttcgtcagaaagctcataaatggtcagtgcttggcctgatgaacctgcgcgtgcagttcttccgacacggtgaacataaaaatccagatcgtccggaagctcgtagttgatgacgtggcttacgcctttaatgtcaattcctcttgccgcaaggtctgttgcaatgacataagtaaattccagatcattaatctgcttcattaccttcttacgctcacgcggcgttaatcccccgtgcagaagaccgatcctcatgcccttttcagtcaggtatttcgcaatatggtcagccgtgtttttcgtatttgcaaacacaatgcccagataaggattcagatgagacatcatatcaaaaagcagtttgtctttatcacgctgtttagaaggaaccaacacatgttcaatcttttcggctgtgattcttttcggctcaacatgcgcgtacttcggattttccatatactttttcaaaaacggcttcagcttttccggaatcgtagctgagaacacaagcatctgcagttcttccggcatacgcgatccgatgtaatcaacgtcttctaaaaagcccatatcaagcatcagatcagcttcgtcaatgacgagagactgcgctttatagacgttcaatgcctgcgccttaatcagatccgcgatccggcccggcgttccgacgacgagatgaggctgtgttttcagcttatcaattgatttttgcttgtccgtcccgccgatgaagcattttgtgcggatcggctcatcttccgcaccctgtgtgattttgagcgcttcctgatgaatctgattggcaagctctctcgtcggcgccgtgataacagcctgtaccgtatcagaacccggatcaatccgattcaaaattggcaataaataggcgtgagttttccccgtccccgtctgggactgcccgatcacgctttcgtttttcagtacggcaggtatcagacgcttttgaatatctgtcggttcataaaaaccaaggcggtgaactgcatctataataaacggttttaagttgtatccatcaaatttagtttctttcatttttcccagctccttaaagcggcacattctgtgtccatcatcacattataaccgattttacttaaaaacaccatgtcttgggggaatcctgttttcgagacagaaaagcaaatgccccctccgatgcatattgtaatagcagagagacagaaaggaggtacaagtatgtttccacagcagccgatgagaaatatggcgcagcagggccggccgtttatgaatccgcgtatgatgatgggaggaagaccgtcattgccgggacggcagctgatgcagcagggacggcagcttttccctcagcagcagattgccggagcgggcctgagaaacgcaggcacgggcggagggggcttaaaagggatgctttcccgttttttacccggttcaggaggaggaagcgctgccgcgtcggcaccggcggcggccagcggaggagcaggtgcaggactgcagggaatacagaacctggcaagtccggcatccctgtcgagcatgctcggcaacgttcagaaggtgctcggcgtggcgcagcaggttacgccgatgatccagcagtacggtcctttagtacggagtctgcccgccatgatgaagctttacagccaattaagcagcagtgatgacgagaatgaatctgacgagacgaaagaaacagacgaacaggacaaaaaggatgaagctgaaaaaacagatgaaacagaagacgaaaacaaatcagacgcctcatccaaaacatcaaagaagacgtctgaaaaagcatccgcttcaaaagaaaaagacgccgcacaggcggactcagcggaacagccgcgtccaaaaagaacatcgggcagatcaaagccgaaattatatatttaacattctttgatatctcacgaaagattagctataatgagatcagaagaatgcaagatttgagccgtttaactacggctttttatattgcctctacactcacttttgataggaggacatctacattggacgttatcaaaatatcgccgcgcggctactgttacggcgttgttgatgccatggtcatagccaaaaacgcgtcactcgataaaacactgccaagacctatatatatactgggaatgattgttcataataagcatgtcacagatgcgtttgaagaagacggcatttacacgcttgacggcacaaaccgtctggagattttaaagcaggtggaaaaaggaaccgttattttcacggctcacggggtatctccggaagtaagaaaagccgctgaggaaaaagggcttgttacgattgacgccacatgcccggacgtcacgaaaacacatgacttaatccgaaaagtaaaagctgaaggttatcacgtcatatacatcggtaaaaaaggccaccccgagcctgaaggagccgtcggcgtcgctcctgaaatcgttcatctcgttgaaacagaggaagacgtgagaaatctcgatattcaggctgagaaattaatcgttacaaaccaaacgacaatgtcccagtgggacgtccacgatattatggaatcagtcaaagaaaagtacccgtacgtggaataccatcaggaaatctgcctggccacacaggttcgtcaagaagctgtatcagagcaggcaaaaaaagcggacttaaccattgttgtcggtgatccgaaaagcaataactccaacagactggcgcaagtgtcagaagaaatcgccggaacaaaagcctaccgaatcggagacatcagtgaactgaagctcgaatggctgaaagacgtcaataccgtcgccgttaccgcaggcgcatcaacaccgacaccgattacaaaggaagtcatccgctttttagagcagtttgaccacaacgatgaatcgacatggcagcttgaacacagtgtgccgcttaaaaaaatccttccgaaagtaaaaataaaaaactgaggcccggggcctcagtttttttataagaaggtaaatgggtttgtatctgtttcggaagcgaaaatgcgcacatcatagtttttctccccggccattgccgtaagcttctcagccgtgccttttctcatgatcttttcagcataatgccccggatccacaacgtttaatcccatcatcatcgcatcatgcgctacatggaaataaagatcgcccgtcacgtaaacatctgcacccttccgctttgcctgataaatatatttatttccgtcaccgccaagaaccgcgacttttttcaccttgctgtttcgctctccgaccatccggactccgttaacgtcaaacttttctttcacaaacagcgcaaactcttcaagcgtcatgtcttgctgaagttttccgatgcggccgagccctttttcaagcggagactgctccactggataaatatcatatgccacctcttcatacggatggctttttttcagcgcttttacgacggttttctccatacttgccggaaaaacggtctcaagtctcacttcatggacgagctccagctctcccgtctgtccgataaacggttctgccccgtccagcggcttaaagctgccgattccctcagaggagaacgcacaatggctgtaattgccgatatgtcccgctccggcgttgccaagtgcggttcttacagcttcttcatagtctttcggaacatatacggcaagctttttcagcgggtccgaatatgtcgggacgagcacttctgtgtctgtcaggccgagagctccggcaagcaggtcattcacaccgccgtccgctacatcaagattcgtatgagccgcatatacggcaatatcatgctttatacatttctcaatcagtcttccgccaggctgatcagtggtgatctgtttaagcggccgaaaaatcggcggatggtgggcgataattaagtcaacttttttctcaatggcttcatctaccgtttgttccagaacatccagtgtcaccatgacatttttcaccggcttattcaatgtaccgatctgcaggccgattttatctccttccaccgcaaaagccttcggtgaaaattgttcaaacagctggatgatttcctgtccgtttacatgtttaggcatgtccgattacctccttcagcagagaaatccgctctttcaattcagctaatttttcatgactttcatgctttgcgctgcggctgatctgttcataaatttgttcagtatgcttaagttcctggctccatttccgaagaaacacttcattcctctcttttaataaaaacggacccgcaagcattccggcagccatcggcacgtcccgatacggcgcatcacggtcgccagtttccgcaacgaggatctcataacactttccgtcttcttcgagaatcacttcatcaatcaattcatagccttcctgatacagccactctcttatatgaacggcatgaatattcggctgcagaatcagccgttcacgccccgtcaatttcgtttttccggactccaaaatatgagcgatcagcgctccgcccatgccagcgattgtaatggcgccggcttctccttttttaaggacgctcagcccgtcacctttccttacggagataagagtgcttaagtccagtttttccacctgctgtttggcggatagaaacggtccgtctgtaatttcaccggcgattgcccggcttgccaaatgattcaaaacggcatagcaaggaagatacgcgtggtccgacccgatatcagcaaccagggcacccggagggatatattccgccacagactgcaatcttttagataacttcatttcattcacaatatcacaacttttctcaggttctttttcctttactatcatataaaaaaaccgcccggaatccaagcggcggatagagtttttcatatgtcttttatatagggaccggtaaagctttatttaatgtcagaaacccattttgccatgtcatccagcttttcggccggcacaaggcctgcgggcatcccgttgccgcctttttcaatttttgttttaatctcagcgacatcttttcttttgccgacgccttttaagttcggccctgaaacaccttcatagttttccccgtgacaggtgatgcagttcgctttataaatctcttcaggtgaagcgtttgcagtttccttctcggcatttttgctttcaccgccgcttgcgatctgatgcgcatctccattgccttttacagctaaaaagaaagtcagccctattcccagcactgcaatgagcaaaaaaggaatcagcggattccacttcatatctccatcccccttattcattctccccctatgtaaacacttctaattctaacttatttttacaaaaagtaaatggtcttgctcagcaatttcattgatttcacaatttatacaaaaagcaaaaataactgttttgtttatcacaaaattatctttattctattgtataatgaattgtatacgcttacaataaagaatataaataaacttatctcattttccccctttcaggacatgccgcattttttccaaactcatttgcaaaacatatgcttatccagtaaaataaaggtatattatccatatatcttatacataaaaaagaacggatcaaaaagacccgttccattctattcgagaaaatccttcagacgtttgcttctgctcggatgtctcaatttgcgaagcgcttttgcttcaatttggcgaatacgctctctcgttactccaaacactttgcctacttcttccaaagttcttgtgcgtccgtcatccagaccgaaacggagacgcagcacgttttcttcacgatctgtcaacgtatccagcacatcttccagctgttcttttaaaagctcatatgccgcatgatccgacggagatgtcgcttcctggtcttcgatgaaatcaccgagatgtgagtcgtcttcttcaccgatcggcgtttctaaagaaacaggctcttgagcaatttttaatatttcacggactttttcaggtgtaagatccatgtcttcagcaatctcttccggtgtcggctctctgccaagatcctgaagaagctgacgctgcacccggattaatttgttgatggtttccaccatgtgaaccgggatacggattgttctcgcctggtcagcgatggcgcgtgtaatcgcctgtctgatccaccaagtcgcatacgtactgaatttatatcctttacggtagtcaaacttctcgacggctttcatgagacccatgtttccttcttggatcaagtctaagaaaagcatgccgcggccgacataccgtttagcaatgctgacaactaaacgaaggtttgcttcagccagtctgcgtttagattcctcgtcaccctcttcaattttttgagcgtaggtgatttcttctttagcagaaagaagatttacccgtccgatttccttaaggtacatgcggactggatcattgatctttacgccaggcggtacgctgaggtcattaaggtcaaattcttcttcggctttggcaagctgttgaatattaggatcttccgtttcttcattttcactaattaattcaacaccttgttctcctaaaaattcataatactcatccatttggtctgattcaatttcaaagctggacatgcgttcagcaatttcttcatatgttaaaacgccacgtttttttccagtttcagtaagctgctcttttacctggtctaatgtaagttctgtttctgtttcgtgggtttgtttatcagccattatggatccctccttccaaagcttgcaacgaattctaaaagcggtatgtttcttatccgacccggaagccttctctctttttcagcatgcagggctgcggataataaatgacaattcatgatgaggttaagcgatctatttgctcctccgcaaggaatcattgccaatcagaacgcaagcctctttgtggtgttactttaatgatcggttcaatgcaacaatttcttgagccagagacgcagctttcacgaagtctttctgcctctccgcatccgctctttctgcttctttttcctttatcattgaccattttcggtgatccaacactttttttacgtaatcggataactcggcctctgagagctcctcgtttacttggagcatccctatatctgaaagcagctggctgatttcctcatcctgcattctcgccataagatgctgcggcgtcatgtcagcgccctcttcataaacagcgtacaggtatgctaccagcgcacgatgtccgtcaatgttaaattcaaagccgacacgctcaatcactttctttatgacgtttcggtctctcagcatatgagcgagcagaagtctttccgcgttctcataggcgggacggagacggcgccgtttcgcttttgtcgtcacccgggcccgtcttgtctgcggttcggcgtttttgtcgccgggggcgttttgtctggcgtagatggaaagctgttcagtcaaagattctaccgaaagagaaaattctgaggcgagctgcttcacatacatttcctgctcaagcgacccggaaagagcgctgatttctttcagcacttctttcatgtaagcgagccggtctccttcgtcagataagtttttccctttgcggaaatactgcattttaaaagccatgaccgtaacgcttgcatcaatgatatcggtccggaatttttctccgccccgggttctgatataatcatcaggatcaagcccgtcaggcagcatgcttactcttaccttacaatcggctttctggagcaggccggccgctttcagcgtagcttcgtacccggctttatccgaatcgtagcagagaatgacctcctgaacatttctcctgaggattttcacatgttcttcggtgagcgacgtccccattgtggcgatactttcttttacgcctgagctgacggcggatatgacgtcagcgaagccttcaaacagaacggctctctcctctttcctgatcggcaggcgcgccttatgaaagttatacagcagcttagatttatgaaacagcggcgtttccgggctgttcatatatttcggctgctggcttccgagcgcccttcctgaaaaagccgccacggctccgtggtgatcatgaatgggaaacataattctgtttctgaaacggtcaaaatacccgctgccgtcttcccttctgatcagcagacccgctttttccatcagttcttcctcaaaaccgcgctttttcaagaatttcgtcatgaaatcccaggaatccagcgcgtagccgatttcaaactcatctatgagctctttcgtaaaaccccttgataaaaggtaatctaacgcttcctggccttcctttgtatttattagcaaatgatggtaaaatttcttcagaagctcgtgggcttccgccatcttctgctctccggaagattccggcctggatgcagagtgaatcgttatatcatcagggaaatcaatctgatatttatccgcaaggtgagaaacagcttccgtaaatgaataaccttccatctgccgtaagaaagagaaaacgttcccgcccgcaccgcatccgaagcaatgaaagatctgcttatcgctggagacggaaaacgagggcgtgttttccccgtgaaacggacagagcccaaagtagttgcggccttgctttttcaattggacataatcacctatgacttcaacaatgtctgctgactgctgcacctgattaactacttcatctggtatgcggtttcccatcttataacactccgtcgtacattattcgatgttttgatttgaaatcccttcatcattcgacaggatttttttaagcagggtaacaaatcgattccgatcttctttatttaattttttaggtcctttggaatgaatgccgcttcttctcattttgcctgacatatgacggctcatcagagcgaagtcaatcgtgtcttcagtataagaacggcccctttccgataagacggcaatatttctgttcagcaaaagagaggctaaaccgatatcctgcgtgactacgacgtctcccgatctcacatggtttgcgatatataagtctgccgcttctttatgaggatcaacgtatacccagttctcgtctttgcttctggaaagctggtagtgttcaaatgatgcgacgaaaataacccgaacgctgtattgcgatgcaatgagcattatttcctcttttacggggcatgcgtctgcatcgacaaaaatcgtcttttctttttcatttagaagactaattctccatccctccatcaatctcctgcataaaaacaagcgaaatcgcatatgctccatgactgcggatctattttgagctttgtcgaaaaatttccgggagttattcttgacatcttacccataatagtttattcgtatcacacgaagcttaaacctaaaaataaacattttatcacaattttttattataatacaaacttcgcgaagatgccatcctttttgtttattccctatttgcatacccaaaaacccaggataaagcgtcctgagttatcggccctttgttttgagatgatgaatgatgttcgctgtttcctcgaccgctttattcgaaacgtcaacgacttggcagccgatccggtccacgattttctcaaaatactccagctcttctttaattctgttgatattggcgtaaatggctttgtcatttaagccgagagattttaaccgttcttttcgtatatggttcagtttatcagggctgatttttaagccgatgcattttttcggatcaacgctgaacagttcttccggcggatcgacctcaggaacgatcggcacattggccactttcagacgcttatgggcaagatattgtgataatggggttttagacgttctggatactccgagcaggatgatatcggcttttaaaatgcctcttggatctctgccatcgtcatatttgacggcaaactcgatcgcctcgacctttttgaaataatcttcatcaagctggcggacgcggcccggttcatatttagcggtcagaccgtaagccgattccattttatcgatgagcggaccgataatatcgtaatacagcacattcgctttttccgcttgttcaaccaggtatttgcgcatttcaggaacaacgagcgtaaaacaaataatgccgccgtccgctttggcgagagacacgacttcattaatggtgccgatatcttccacataaggtattcttctgatatgcgtatcatctgctgagccgttaaactggctgagcgaggcttttacaacgagttcggcggtttctccgactgagtctgatactacataaatgatgcgattgtccatgttatccccccgttagttttcaagcttatatgatttcattttctgataaactgacaagtatcctagtcatattcgttttggtaaaccggccgatgacctcaaagcctttatccgtatctttaataacgggcagggcatcgatctgtttttcaattaaatacttggcgatgtccatcacataatcgtcacgccggcagacggcgatattcggcattcttgtcatgataatatgaaccggtattgaggcaagttcctgctggccgatgctcgcccgcagcaaatctttgcgtgacagcacaccgactaagacagcatcacgatctacgacaaataacgtgccgacatcttctaaaaacattgtgcagatggcatcgtataccgagacattctcattgatgacaacagggatcgattgaaaatctttcacttgcagctttttcagtttatccgcaagcagctgatttcccgttttccccgtataaaaataaccgacccgcggacgggcctctaagaagcctgacatggtgagtatggccaagtccggccgcagcgtggccctcgttaaattgagctgttctgcgatatgctctccggtaatcgggccgttttcctttacaatctgtaaaatttgttcttgccgtttatttaattcgatcgtactcaccacctttatggaagggtttctttatctatgttttcattctgtgatgtttatgtaaaaggggaaaagacgattgccgatcacacagcaaccgtctttttctttattttacaataagatgattcatattagcaaaagacttgatcacatctgcaagagcggtcatttgcgctaaacggttggtttttaatgcttcatcgtccgcatttaccatcgtgtgattaaagtagtcttcaatcggctcctttaatccgctgagcacggcaagcgcctgttcatagtttttggaggcaaagctttccgcgacactgtcttttgttttttgataagcgtcaaacagctttttctcctgttcattttcaaacagatccggattgatatcgcggctctcgccttttttgctgatggagatgacccggccgagtgattcagccgtttctttaaatccgggtgtgccgaggtgcttctcaagcactcttgctttatgaacggctgcatacggctcaagctctgtgctgtccagaacggcttcgataacgtcatgacggatgtcttcagcgtttaagacgtatttcagacgctgtgtaaagaaatcgaggagctcattttctttttccgtttctgtcaatgacagcagctctttaaaagaaatgccccagttgcggtcgatcagaatggaaacgatgccgcttgcctgacggcgcaatccgtacgggtcctgagaacctgtcggaatcacgtcaatgctgaagaaggaagcaatcgtgtccagtttatcagctaacgctacaaccgcgccggtgaaggttgaaggcacttctcccccggccgctctcggcatatagtgctcattgacagcggcagcgacggcttcatcttcaccgagcatgcgcgcatatttttctcccatcacgccctgaagctcagggaactcatagatcatatgtgtaaccaggtcaaatttagaaatctctgcggcgcgcttcacaaggttttgcgtctgttcatccgctttcaggcggacggcaagtttgcccgcaatggcggccgctcttcttactttatctccaagggagccgagctcttcatggaaaacgatattttccagtttcttcacgttttcatcaatgttgagcttttggtcttctttgtagaagaacgcagcatctgaaagccttgctctcagcactttctcgtttccgcgggcaacattttcaattgcatggctgttcccgtttcttaccgtaataaaatgaggaagcagattcccgttttcatcttttaccgggaagtagcgctgatgctctttcattgttgttacaagcacttcttcaggaatagaaagaaactcggattcaaaagatccgtaaagcgccgtcgggtattccaccagatggttgacttcgttcagcaggtcctcatcgatcggaatgttccatttcttctcggctgcaagcgcgtccagctggctttggatcatttgtttgcgttctttcgggtcagcaatgacgctttgttctttcagcagcttttcatatgatgacggcgcatcaacagatacttcttggccgagaaagcggtgtccctgtgtgttccggcccgtctcgacatttgtgatttcaaacgaaatgacgtcttttccaaagagagcgataatccatttgatcggacggatatagcgcagatcctgcgtgccccagcgcatgtttttcggaaaatgcattccggcaatcaaattttccagctgcggtaaaagtgtcttcgtctcttgtcccgcctggaatttttgaacgaagacatattccgtgccgtttacatcttttatatacagatcatccactccggcgccttggccttttgaaaatccgatagcggcttttgtccagtttccgtcagcatccagagcaatttttttcgcagggccttttgcttcttcctgaatatcagcctgtttttctgctacgtcttttatatatactgccagacgtctcggcgtattaaaaagtttcacttcgccatgggcgatatttttttcagccagccagccggtcagcttttcaccgagctgcaccatgctgtcatgtaaaaaccgcgccggcatttcctcgagtccgatctctaaaagcaagtcttgtttactcatgggaagagccctcctctttaagcattgggaaccctaatttttcccgttcttcataatacgtttttgccacttttctcgctaagttgcggacacggccgatataacccgtccgctccgtcaccgagatcgcgccttttgcatcgagcagattaaatgtgtgagagcatttcagcacataatcataggccggatgcacgagcccgttatccatttgtctgatcgcttctttttcataggtgctgaacaaatggaaaagcatatccacgtcagatgtttcaaaagtataaacggaatgctcatattcagccatcataaataaatctttcacagtaaatcctgacgtccattcaagatcaaagacgttttctttatcctgaatatatgacgcgagacgttcaataccatacgtgatctcaacggataccggtttacattcaattccgcccacctgctggaagtatgtaaactgagtaatttccatcccgtcaagccatacttcccagccgagacctgcacagcctaaagacgggttttcccagttgtcttctacgaaacggatatcatgttcaagcgggtcaatgccgagcgcacgcaatgaatcaaggtaaagctcttgaatgttatcaggcgacggcttgataatgacttggaattgatgatgctgatagagcctgttcgggttttcaccgtaccgtccgtccgcaggccgtctggacggctcaacgtaagccactctccacggttccggcccgatgcttcgtaaaaatgtatacgggctcattgtgcctgcgcctttctccacatcatacgactgcatgagcacacagccttcattcgaccagtgcttctgcaaggttaaaatcatatcttgaatgttcatttcaagcacctccactttctccattcttttacaagtgcggcggcaaccaaaaaactcccgtctctatgcttgccggccgcaaacatagggacgagagttctcccgcggttccaccctagttgctgaggatgtgaatcactcagcctctttttaaagggttgctcgagaatgcctttcgttgcgcgctcatccttagcttacactgccctaaggtcgcttgtatgagttggacgcaagtacttctttctgtcactgcaacatattttataataaatgatcatataaaaagatgggcagaatgtcaacttttgttttcatccaaaaggttcttcatgctttccatctgatctaaaaaccgttttgactttaaataaagtcctgaatattcctcgtaatacagatcaatgacccgtttaatttcgtttttggtttcctgttttaacgagacgctgccgagccttccgatatcaaagtaataaaaaagccttagcagccttgccgtttgcggcgaaatcggaactctgtacggatccttttcaaagcagcggtggcagataaacccgttatctcttatcgaaaaatgaaacgttccttccccgcttttgcagtggacacaatgattcagctccggatacagccccatgacgccgagcattttcatctgcacgatgaaggtgatcacgtccgggtcagtcccgtcattcagcctcttaaaggattcgagaatcaattcgaataaataggggttcggtttcttctcttccgttcctttgtcagtgagttcagcgataaaagcggcatacgccgtcaaaaataaatcttctctgatcgttctcatgctgagaatcatttcaccctgctggagcgtgccgagtccggatgttctttgcattaaaaatgacccgtacaaaaacggctggctgactgctgacagccggctggctgacttcctggcgccccttgccatgacgccgattttgccgtgttccctcgtcagcaatgtcacgattttattcgtctccccgtagtcattcgtacggagcacgattccttcacatttagtcagcatttccgcaccttccaacaatgggaggggccaagaggtttacaaaattggaaaatcaattcgggctagctcatcttccggttcttcgggtctttccaggttctctttttccagttctttaaaaagaaggtacgtatcaacacttcctgtttgagaaaatacgttccaggtaaaattcaacacaaaaaacccacctttcatcattaaactagcttgcaaatccaaattcttacccttatcttgacctgatgtcctccttttcatgttaaacaaattttgctaacgaatccctgcttctgtgaggtaatctcacacctcaggcatgcgccttagatgaattaatattcatcctctttgaagccgaaatcacgcagctgagacattttattccgccagtccttctgcaccttcacccataattccaggtaaacgcgtgagcccaaaagagcttcaatatcagcccgcgctcttttgccgacttctttcagaagcgctccttttttaccgatgacgatgcctttttgagaatcccgctcgaccacaatggtggcggcgacatggacggagccgttttcctgccctttaatggactcgatggcgacagcgatgctgtgcggcacttcttcccttgtcagatggagcactttttctctgatcagttcagaaataatgaaccgctcggggtggtcagtcacctgatcgctcggatagaactgaggcccttccggtaaatacgcttcaatctgcgcgagaagggtttcgacgttgttcccttccaaagctgagatcggcacgatttctttaaacggatagcgcgtacggtactcatcaattaaaagaagcagctggtcagggtggatcttatcaattttgttaacgatcagaaagaccggtgtagacgtctgtccgagcttttcaatgataaactcgtcgccttttccgtacccttcttcggcgttaatcataaataacaccaagtcaacttctttcagcgtattctgcgccactttcatcataaagtcgccaagcttgtgctttggtttgtgaatgcccggtgtatcaataaaaatggtctgcgacgtgccggttgtcagcaccccttggactttatttcttgtcgtctggggtttgtcgctcatgatggcgatcttttgaccgatgaccctgtttaaaaaggtagactttcctacattcggccttccgatgatagatacaaatcctgatttaaagctttcgttcgtcatgtaaatcctccgatgaaaatgcgcccggcaataattcttccgcagtcatttcttttatttgtccttgtaagttggtcagaataacaagcatatcctttgagcacagctcggaaattacttgtctgcaggctccgcacggcgaaaccggtcccggagtatccgcagccacggcgagcatcgcaaattccgtatccccctcggaaacagctttgaatatcgccgtgcgttcagcacagttgcacatgctgtatgccgcattttcaatgttgcagcctctgtacacttttccgtctttggtaagaagagcggctcccactctgaaatttgaatacggcacatacgctgtgtcccgcgcttttaatgcttctgcaatcaattcttgtctgttcatgtgtacttaattcctctcttacctttatcctgtatgataccgctgtcacttttattttacataattatgattggtttttcacgcccatttttggcaatgtaaaataattgtaagaatcttctgctaacatatcttcggcaagaagatgagtaaaccaatgatacacgatatcacggcaaagacgcaaacggctccggcggccgcgtcctttgccgcttttgcgagcgggtgatactgatcggtaactaaatccacaacatgctctatcgccgtatttaaaagctccaaagcaagcatccctccgatcagcaccaaaacaacggcccattcggctgtgctcagcccggtgagaaaaccgcaaacgataacggcgcaggccgcggtaatatgaaattgaaaattccgctctgaccgcgccgttttccagattcccctccatgcatggacaaagctcttcaggaacctgctccactcgtttttatgatctcgtgagtccatactcatccagcaaatccttttgctttgaaaacatttcttcctcttcttcttttgtcatgtgatcatagccaagcaaatgcaaaaagccgtgcacggccagaaaaccgagctccctcataaacgaatggccgtactcttccgcctgctctttcgttctgtctgcgctgatgataatatctcctaaaacaggcggcatgtcggcgcctacgatttcaacctcgtcttcgccttcttcttcaagcgcaaacgaaatgacgtcagtcggagtgtcttttccccggtagtctctgttgatttctctgatttcctcatttgtcacaatcgtgaccgatacttcagcctggtcctgaacgccttctttttccgccgcgaattggagcagcttctccacttcttggagcgcatcagctgagacgctgttcgtttcatcaacaatatctatgagtaaacccatttatttcaccttcttcgtagcctccggatattcaatccgggagtggaaaattccttttaaagtcgcacatagtgtttttgcgatcgtatccagttctcggaacgtgagatcacattctgagaattgtccgtcctgaagcttatcggatataattccccgcaccagtttttcgatccgctcgggattgggattatgcatggaacggacggcggcttcaacgctgtcggccactgagataatagccgcttctttcgattgcggcttcggccccggatagcggaactctttctctgtaatctggtcgcccttttctttcgctttataataaaagaattttaaaagggacgttccgtgatgctgctccgcgatatccacaagctctttcggaaacttatagcttctgagcatattcgcaccgtctgtcgtatgtgcgataatgatatttttgctgagctgaggagacagcttgtcatgcggattatccatattcatctgattttcaataaaatattgcggacgtttcgttttgccgagatcgtgataatacgctccgacccgtgctaaaagaccgtttgcccctacggcttcacaagccgcttccgacagatttgccaccatgacgctgtgatgatatgtaccgggtgtttccgttaaaatcttacgaagcaggggatgattcggattagacagttcaatcagcctcattgttgaaagaatgccgaatcccgtctcaaaaaacggcatcagaccgataatcaaaacggatgaagcaagtcccgagacgacccccatcagcatcagcgttccgatttcaaccggtgacagcgccgtattttgtattaataaaagcgacagcacgataatcatattaataaatgagacgaacagtcccgtctgcaatatttttgacctcgcattatgttttcccaaaaacagaatgcctgaaatgctgctgattaaatagtaaatgccgatgacgtaattaaatgttcccgtcacaccctgattaaacatcatactgccgcagatcgccagaatgatgcttcctaaaatggcgagcctttcattgagcagcagcctgattaaaatcgcgccggcggcgatcggcacaagatagccgatattggtgtattcaatcttctgaaagagactgacgacttccataatgacgagaataagcgttgtaatgatagaaaacagcaaaagagatttatttttcagcttaagctcctgctgctgtttctcaaaatagtagacaagcgtggcaataaacaggccgatcatcagaaggagaccgctgatcggttttaacaggttggaattattcaaaagacccgtcagttcaagcttcctgtatacttcccggtcaatcagatcattctcttccacgagaacctgtccctgtttgatctgtaccggctggacgctgtctgacgcttcctggcgtttttcatcggtcgctttcggatcaaaaacgtaattcgggatgaccgcgtattttccgatttcagtcgcagccgctaaatattttgacggcacagaagcgcttttcagctcttttgcgaccttatccttcgcttcagcaagcttttcagaaggaatttcactgctcatcaccgtattcaccgcggtaatgacggaatccctcacaaatgagaaatcttcattgtttgcatggagaagcgatttaatggcatcttccgagacggattcattgacatcctgtgtcagcttgtttttcaccgattttaccagtgatttttccgaaggtgactttttgtctttttccgcatcttttttcacttcgccgatgctgtcaaaaatggaagtgattaggtcaagccggttgtcggtatagccttttttcagagtgtattgatcttccaccgcatcttcggccgcctgttttttcgattccgtcgcctgctgatcttccactgtggcgggcgcgtaaatcgttttatcactgactgcaaacaaatccaaattaagtgattcaggttttacatgaataaagagcaaaccaaacatgatcgctgaaagcagcaggtacagcagcacatgggctgagcgggcatgtctgaaactgcggaaccgttcccgggcgcttttgccctttcccttctttttcaaaacaagaacctcctccctgaaacatcaggaacacatcatataaaaatgacccgataacgggagatcgggtcatttttgcattacttttgcttatcataagcttcaataatttttgcaacaagcggatgcctgaccacatctgtctggtcaagttcaatcacggagatgccgtttacgtccttcagcatgtccttcgctactgcaagtcccgatgtgacgcctttcggcaggtcaatttggcttacgtcgcccgtaatgatcattttagagccaaaacccaatctcgtcaaaaacattttcatttgagcgggagtggtattctgggcttcatcaagaatcacatacgcgtcgtcaagcgtccgccctctcatataggcaagcggggcgatttcgataacccctctttccataagacgctccgtatggtcgcttccgagcacatcatggagcgcatcatacagcgggcgcagataaggatctactttttcctttaaatctccgggcagaaaaccgaggctctcgccggcttccacagcgggtcttgttaaaatgatttttttaatgtggccgttttttaaagcatgcaccgcttttacgaccgccaaataagttttgccggttcccgccggcccgatgccgaacaccatgtcgtttttcttcatcgccgccacatattctctttggccgatggttttgacacggatcggtttgccttttgccgttttcgttatttcctcttcatacatgctttcaaaatagtccagttcatctttttttgccattttcacggcatacagcacatcacgttccgaaatctcgatccccttgcgaattaaagtaaggagcgagcccaataatctgtcagcgatctcaaatgtttcatcattcccggaaacgtaaatggtttcaccgcgtgtgatgaggctaatgcccagatccttctccattaaatgtaaaaaggcatcttggctgccgaacaaagaaagtgcttcgtccgggcttttcagtttgtgattaatcgcaagtaaatgttctgccattctttagtctccctgaacaataggtgtggtttgaacgatatcttctataacttggtagagaataatcaactttactttaccattctcaacggattggtgcaaaactttttcactttccacctctccgctgccgtttaatcgcttttctacatcttgtcttcccattttgataccggcctgaaccgcttcgcctttcgtataagtccgcacggatgtttcactttctcttgtctgttcttgaacgtaagaaaccggaagcttcatccccagaaattgaaacggatgcttttcttcctctgttttcggatgtttcagcggcttctcattaaattcaaagccccaaaaaggaacgccccatgatccgaaagacagcttgtgcttcgtccttactttacccgtatatagcgtaaatgatgtttcaagaggcacggtgacttctgacttgtaccatgtttctccgtaaatttccgcttttgaggcgactttccggtcttcatttccgatcagtcctgagacgaggagctgtcctttgtcaacatgatcgttcacaaaagccatcggctgccccttttgcacgaacatccttttgatgaccgccttctttttggcaacgatatggcgggggcttacgtacttttcttttgtcggttcgttcttttcgaccactttcatatgaagggctgtcccgttcaattccacaccgacccacgtaatattatcgatgccgtttgttaatgatttttgaattttttccggcgtcatcattaaaaattgcaaacggccttttttcacaccgatttcttcaaggtgctttaccatctgatgctcggtttctggcttggcccctttaatatcaatttcccaaatcatgttggacaaaagaaacaatataacaaaaaatatcacaaatcccgcagtgaagcccagatttaactttgatttgagaagcagaaagggaagaccctttctttttgtaaagcttgctttgcattcatgttttctgatgactcttctgaaagcatgtacatcttgaagctgaatcatcagcagaacacagtcttgcttttttttcaccgcaaagatggcgattccgtttctcgtgcattcattcagcagccgttcaatcccttttcctttgacttccatttggactttacccgaaaaaaatgacagccatttgtttttcacattatttccccccggctttatgaatcgacatatcgtacgtgatctatcgtgccttccaaaaggatttcctcaggaaggattgccttaatgaccaagttttttcctgatatgatacactgcccctgcttgagcatcagcctgacttcttcttcactgaacagcaggaggcctctgtgattctctatgtagatatgaagtctgccgaccatcgtaatacgaggcagatccatcataacgtccgggggaatttccaatgctcttgtcagccatgcctttacacgattctttctttgccccataaaaaaagaaccccctttcatctcatatgtatgatttgaaaaggggttctaacactttattttttaccgatgttccgcatggtccggtgcggtttttttgcacggggcggacccaaaacctcactgaatataatgccttggaccgcagtttctttatttattttgagggctgatttcttcagagacgcgtttcgtgcgcgtgcggatgtcagcttatgttcgagcccgttaaacatctgctccgtctccgctaggcgcttttcagtttcccttcttttttgctcaaaagggttctcttctgaaacggcaggcaattcttccgcttccggcttatgctctttctgcggctgtttttgatcctgcttttttgcctgatttccgggacgtgtacccggcggacgtttttcatctttgtttttcttgccgaatattgccgatataatgccgatgacggcggcaatgacgagcggatttgtcagaatctcgtgcatatagcggctccctccttaatagagaggttattgttggtcttcatcttgctggtcattcgtcagcttgccgatagaatccctcatgtccgtatccgcgtcgatattttttatgttcatatagtccatgacgccgatgtttccttcacgcaacgcttctgccatcgcaagcggcacttcggcttctgcttctacgactttcgcacgcatttcttctacgcgagcgcgcatttcctgctcttgggcgaccgccatggcgcggcgctcttcggctttggcctgcgcaatgtttttgtctgcttctgcctgatccgtctgaagaatcgctccgatgtttttgccgatatcaacgtcggcgatgtcaatcgaaagaatttcaaatgcggtgcctgaatccagccctttgccaagtacggtctgagaaatcatatcagggttttcaagcacttttttatgattgtgtgaagaaccgattgtcgagacaatcccttctccgacacgggcgacaaccgtctcttctcccgctcctccgacaaggcgctcaatattggctcttaccgtgattctggcttttgcttttacttcaattccgtccatggcgacacccgcgataaacggtgtttcaatgaccttcggattgacgctcatctgtacggcttccaatacgtcacgcccggccaggtcaatggctgcgcagcgttcaaatgacagctcaatattggcgcgctgtgccgcaatcagggcattgaccaccctgtcgacattacctccggccagataatggctttcgagctgatttgttgttgcggacaggccggctttgtgcgctttaattaacggattgacaacgcggcttggtatgacgcgccgcagcctcatcccgaccaaagtgaaaatgctgattctgactcctgccgcaagcgccgaaatccatagcatcaccggtacaaaggtgaagaatatggctaacacaataatggcagcagcaactaatgctaaaatcgccaaacttgacagttccatctaattcctcctcaaggttatcatctatatttctctcacgacaatgcgtgagccttccgctttcactactttcacctgtctgtctttttcagtgaatgatccttccgagacgacatccagacgttcatcatcaattatgacggtgcctgacggtctgagggctgtagcggtaacgccgacttttcccaacagctccgtccggttctgatttgaaacataaccgctctccgtgcttgttgaatcagttaatattaattttttaaagaatttcattcgtttccccaacacccttgttaatatgataaaggctgtaatagacacagcaatggcgatcaagagagaaaccgccattacggtaaagctgcccgcagcgagaaagaggctcgcgatgacgcctgcaataccgataagaccgattatgcctccgggcagaaatatctctaaaaggataaaaaccaagcccgcgcaaaataagaatacgctgtcatagccggcgaatccggcagcgatatgcccggtgaaaaacagcagcatggctgtcagtccgacggcacccggtatcccgaggcccggcgagaacaattcaatggtcaaaccaagcaaagcaagcgttaataagacggggacaacaaacggatttgtcagccatctgcccagtttgccgacgaaaccttcttctgcatggtgaacatccgctttgtcaaaaccgagctttgtatataaagcatcaaggtctgaaaccgtgccctccgaatatccgacttccttggctttttcagctgtcagtgtcagcagttttccctttggggcgcccgcttcctttgcattaatggcgggatctgccatggccagggcgtatttcggatttcggttgtttttaaccgctgcgtcctccatttctgcatgccacagtgattgggcctttttgtctgccgcgtttccctttccgtcgatgatggctgcggcacccatttttccgcccggcgccatatagatttcatctgcctggagcgctatatacgctccggcagaaagcgcccgtttattaacgtaagcggtaacaggcacatccgcgcggccgatgatatccgcaatatccaaggctgattgaacggcgcctcccggtgtattgatgtcaagaataatgtgtgacgcgccggactctttcgcttctttgaaagaacgcgataaaaacgaggcgagcccctgttcgacatttttctcaaccgggatgacataaaccgatgggtgatcagctttcgcgttcaattgaacccctaataaagataatacaaataagcccaatagagcaacagcaattccggttttttttcggaacaaggcaaatataccctccttcccgtttcgttcttctttatatacgtaacaaatgtactttagtttcatttttttatgtataaaaaaagacatctctcaaggaaagatgtcttttttcttgtcaattaagataattgactgctgacaagtctgttaattacgctgccgtcagctttaccttttactttaggcataatagcactcatcactttgcccatgtccgctttggagctcgcaccgacttcagcgatggtttcatttacgattgtctgcagctcttcttcagaaagctgcttcggtaaataaacttctaaaatgtccagctctttttgaactttatctactaaatctaaacgattagcgtttgaaaattcatggagggagtctttacgttgcttaagttcacgagataggacagtaagttcctcatcctcggtcaaactgtctttcttaagcttaattgcttcgttttgaagtgaagctttcaccattcgaacgacagtcagtttgtctttctcacggcttttcatatacagcttcatatcttggttaagtcgctcaagaagactcataaatccaccctcttttagaatttgcgttttctagcagcttctgactttttcttgcgctttacgctaggtttttcataaaattcgcgctttcttgcttcttgcaaagtacctgtctttgatacactgcgtttgaagcgacgaagagcatcttcaagcgattcgttttttctaacgaccgtttttgacattctctttccctccctccgaatacaccaatcgactacctttaaaaagatacatatataaacatgtactttgacattataatataagccatcagtcaggtcaactaagcgagctcacttttccgtcatgaataaggctgcttgtctatataatgatggaaaggggtgtttcgtttgatgatactgattctctttaccgcacttatcctggtttttttactcggaatgagcctgctcaggcaggggctgatcgcattaacgtattcaaaaattgagaaaagcctgctcttatttaccgaccaccctttgaaagcttttctcataagcatcgtgttcaccggttttcttcagagcagctcagccttcatggtcattgtcatcggctttgtcagcgcaggcgctttatcttttaaacggaccattccgatgattctcggtacgaatgtcggctccacgtttacgacggagtttttagccataaagatggatgtgctcatttgggtgctttttatcggaggccttgtgtttatcctcctccgtaaatatccgttcaggcagatcggcataagcttcctcggtctcggcatcatctttttttgcatcacatgcttcagccggctcgccgttccgctgacagaaatgaaggcgggggcggaggttttgcggcatgtgaatgattcgagctggtccgctctttttatcggcatgatattgacggcaatcattcattcaagctccgtctgcatcggcattttgatgagttttatgaacgaaggggtgatcggcattgaacaagcggtcagcgtcgttctgggatctaatatcgggacatgcgtcacggccgtcatggctgctgtttcaggcggttatgccgccagacagaccgccggtgctcacgttgtgtttaatattctcggcgtgctgctcgtatttcccttcctgtccgcatcagcaggttttacggagcgcctgtctgatgatcccgcgcagatgattgcgcatttcagcctgttatttaacgtagtcaccgccttattgtttctgccgttcacacatttgttttaccggctgattgacaggctgattcctccgaaaccgtaaaaaaaccgatgcgggaaggcaccggtttttttatctgttatgaagacatgcgcatgttccgggtcatttcatcctcaacgacgcggacgaattgcccttcattatacggatagcccgctttttgaattttgactttgacaagtttgccgattacatcttccgtgcctttgaagacgactttcatgtaattgtccgtatagccgacgaacatgccgtcttcatcagactctttaaacgcctcttccggaatgatttccagaacctctccttcataatcggaggcgtattcttttgcaagctggtcagacagcgcgatcagcttatgcacccgttcgtttttcacgttctcgtcaacctggtcttccattctggccgcaggtgttccggtgcgtttgctgtaagggaatacgtgaagctctgaaaacttatgttctttaatgaaccggtatgtttccataaattcttcttccgtttctcccgggaaaccgacgatgacatcagatgtgacggcaagacccggcagcgcttctttcagcttatttaaacggtccgcgaaaaattccatcgtatatttgcgtctcatccgtttcagaacggtgtttgatcctgactgaatcgggatatgaaggtgacggacgattttatcagacgcatccagcacttcaatcacttcatcagtgatttggcttgcttcaatagatgaaattctgatccgcttcagtccttctacacgtgtatcaagctcgcggagaagcttggcgaaattataatctttcatatcttcgccgtagccgcccgtatgaatccccgtcaggacgatttctttatagccggcatccaccagctgctgcgcctgtttaatgacttcttccggatcgcgggaacgaagcaggccgcgcgcccaagggataatgcagaacgtacagaagttgttgcagccctcttggatttttaacgacgctcttgtacggtcagtaaaagcgggaacatccagctcttcaaacacgcgtgctttcataatattgccgacgccgttgatcggctggcgctcttccctgtactgctcaatgtaaccgagcattttttcacgatcctgcgtgccgacgacgatgtcaacacccgggatggccataatttccgccggagaggtttgcgcatagcaccctgttacgcagatgacgccgtcaggattttggcggatcgcccgtctgatgacttgacggctttttttatctcccgtgtttgttaccgtacatgtattaatgacatatacatctgctgtctgttcgaattcttttcgttcataacccgcatctttaaacagctgccagattgcttctgtttcataatggttgaccttgcagccaagggtatgaaaagcaacagttgccattactgatcacctcttaataactctgtatgataggaaactgcgcttaacgcgtaaagaggcgcagtttcagtccgtaaaattctcggtccgaggccgcataagacggcgcctttttctgaaagctgatgaacttcagactcagtcagaccgccttcagggccgaatacgattaaaagagacgaaccttgcggaaggcttttgagctccgcagcgaaagcgcccgtttctccctgctttgatgactcctcgtatgcaacgacacatttatcgacattctccgccatttcaagcagctgccggaacgtatgaacggttttcacttcgggaatttcattgcggtacgattgctccgccgcttccttcgcgattttcgcccatctctcccgctttttctttgcctttttgtcgtctagcttaacgacggatctggcgccctgaaaggggatgaacatactagcccccagctcggtccctttttggataatccattcaagcttatcgcctttcgggaggccgcttgcgatcctgatcttcagcggcagttcacggttttcacccgtccactcagcaatgctgcatgatatatgatctttagaaacctctttaagcaggcataacgcttcatggccgtctttcgaacagcagataatccggccgcccgcactcattctcatgacgttcgctatatggtggacgtcttcccccgtgatttgaaaatcgggagtttcgtccatctcctgcttcgtgagctcgataaaatatcgttgcatacgctgtgacacctactaactgttattttttcgcgatgatgctgacccaatcttccatagacagaatttctatgatggtaaagccggctttttccaacgcttcttttacttcctgttttttctggccgataatgcctgaagtaataaaatggcctccgtctttgagcaggtcgtacgcctgtgatgtaaagcggagaatcacttccgccaaaatatttgcgacaatgacatcatgttcgcccgtgatgccgtctaacaaattgttctgcttcacttcggccgtatcactcactttgttcaattttacattcagacgcgcgctttcaacagcgaccggatcaaggtcatacgcatgaaccgattcggcctcaagcatggcggccgcgatgcttaaaattcctgaaccggtgccgacatcaatgacacggtcgcctttttgaacgatacgctcaagcgcctgaatgcacagaacggttgtcggatgcgttcccgtaccgaatgccatacccggatccatttcgataatcagttcatctgtatgaacaggtgtgtacgtttcccaagtgggaacgatcgtgaacttttcagaaattttcacaggatgataatactttttccaagctgtcgcccattcttcttcattaacttcagaaatggtgattgtgtttctgcccaaatcaatgtcgtacaaaagcagattattaatcgtctctttaatgccgtccaccgtttcgccgaggaaactgttgatcggcagatacgctttgacaatgacaccctcatcggggtaatcattggggtcgagctggtagatttccccgtaaacattctcacgctctttcattaaatcaagcggatcttcgatgacaaccccgctcgcaccagcttcatgcaaaatatttgagatgggttcgaccgcttcatgtgttgtgtgaatgctgatttcggaccatttcaaaactaccaactcctatccaatcattactcgcctttaaatgcgcgttttactttgtcaaagaaactcatttcttgttcatccggcaggtttccgctgacttcagcgaactcgcggatgatgtctttttgtttgtctgtcagattcgtcggtgtgacgacgcggacgacaatgtgctggtcgccttgtccgtagccccggacgttctgaacgcctttgcctcttaatctgaatttcgtgcctgtttgtgtgccggcaggtattttcaatttcacttttccgtgaagcgtcggcacttccacttcgtctccgagtgccgcttgggcaaacgttaacggcatttcgcaataaatatcgtctccgtcgcgctcaaagaactcgtgggcgcgcacatggaatacgacaaacagatctcccgcaggccctccgtttacgcccggttcaccttggcccggaacgcgcagctgctgtccgtcatccacaccggcaggaatggtgacattgatttttttccgttttttcactttgcccgtgccgccgcagtcagaacacttgtttttgatgatttttcctgttccttcacagtggtggcagactcttcggttaaccactttgccaaacggcgtgttctgttcgacgttcagctggccagaacctccgcagtgcgagcacgtatccggctttgttcccggcttcgcgccagaccctttacatgtttcgcaattctcttcgcgcggaatttcaatgatcgtttcttttccgaaagccgcgtcttcaaatgacagggtcattgtatactgcagatccgcgccttgccgcggcgcattcgggtcacggcgtctcgtgccgcctccgaagatgcttgagaagatgtcatcgaaaccgaagccgccgaagtctccgccgcctccgaaaccgccgccgaatccctggttagggtctgtatggccgaattggtcatattgagcgcgtttttggtcgtctgagagcgcttcgtacgcttcttttacctctttgaatttttcatctgctccggattctttattgatatcaggatgatatttttttgaaagcttccgataggcttttttgatttcatcctttgaagcgctcttacttaccccaagcacttcatagtaatcacgcttactcatctcgcttcactctcccgaatttctcacataaattagattgtatcattttgaattatgttttttcaattccttttatcccgggcaagaaaaaaagtcaaagccaagagatgcctgactttgactttctgtctgttgaatcagaatatgctgtgtgttcttccgcctatagtctgtgcgggaaagaacttattttttcgtttcgtcgtcttttacttcttcgtattccgcatcgacaacgttgtcatccgcttttttgccttcagcgtttgctccgccttcagcctgctgcgctttcgccgcttcttcgtaaagcttcatagaaagctcttgaacgattgtttgaagctcatcttttttcgctttgatgtcttcaatttcgtttttctcgatagcggctttcagcgcgtctttcgcgtcgtttgcttttttcacttgctcttcgtccactttgccttccagatcttttaatgttttttccgtttggaacacaagctggtcagcttcgttgcggacttcgatttcttcttttctcttcgcatcagcgtcagcgttttcttccgcttcttttaccatgcgttcgatctcatcatcagaaagacctgaagaagatttgattgtaatgttttgttcttttcctgtgcctaagtctttcgctcttacgtttacgataccgtttttgtcaatatcgaaagaaacttcgatttgcggtacgccgcgcggtgcaggcgggatatcagtaagctggaagcggccgagcgttttgttgtcggcagacatcgggcgctcaccttgaagcacgtgaatgtcaacagccgtttggttgtcagctgcagttgagaatacttgagacttgctcgtcggaattgtcgtgttgcggtcgatcagtttcgtgaacacgccgcccattgtttcaataccgagagaaagcggtgtaacgtcaagaagaacaacgtcttttacgtctcccgtgatgacgccgccttgaatcgctgcacccagcgctacaacttcatcagggtttacgcctttatgcgcttctttacccgtttcttttttgattgcttcctgtacggcaggaatacgtgttgaaccgccgacaaggataactttgtcgatttcgctcgcagaaagatccgcatcttgaagagcctgacggacaggagccattgtgcgctcaacaaggtgagcggaaagctcttcgaatttagcgcgggtcagtgtcagctcaaggtgaagagggcctgcttctcccgctgtgataaatggtaaagaaatttgtgtagatgaaacgccggaaagatcttttttcgctttctcagccgcatctttcaaacgctgaagcgccattttgtcttttgaaagatcaatgccgttttcttttttgaattctgctacgagatgatcgatgatgacttggtcaaagtcgtccccgccaagacggttgtcaccggcagttgaacggacttcaaacacgccgtcgccaagttcaagaacagatacgtcaaacgtaccgccgccaaggtcgtaaacaagaatcgtttggtcttcgtccgttttatcaagtccgtatgcaagcgctgctgcagtcggctcgttgataatacgttctacttcaagaccggcgattttaccggcatcttttgtcgcttggcgctccgcatcgttgaagtatgcaggaaccgtgataacggcttttgaaactgtttcgccgaggtagctttcagcatatgctttcagatgctgaaggataatagctgacacttcttgaggcgtgtagtcttttccttcgatttccactttatagtcagtacccatatggcgtttgacagacatgattgtgttagggtttgtgatggattggcgttttgccacttcccctacttggcgctcgccgtttttaaatgcaacgactgacggagtcgtacggtttccttcagcgttggcgataactgtaggctctccgccttcaagcactgccacacatgagtttgtcgtacccaagtcaattccgattactttactcactttgaattacctcctgctatgtagttattgattcacttttaccattgaaggacgaatgacgcgatccttcagtttgtagcctttttgcagttcttcgataacaatattgctgccgaagttttcatcttccacctgcatgacggcttggtgaaggttcggatcaaattcctggccgacagcttcgatggcttgaacgccttctttttcaagtgcgtccatcagctggcggcggaccatttccataccttgcagcaagctttttgtctgctcgctttcagcttctacctgtaacgcccgttcaaagttgtcgagcgccggaaggatttccgttacgacgttttgagaacggtatttctgagcagcttccatttcaaggcggctgcgtcgtttatagttttcaaagtctgcttgaacacgcaaaagcttgttttctttttcatcaagcaaaccctgcaattcatcaatttggtgctgaagggcttcttcctgacctgccgtttcttcatgctgctcttgtgaagcggcttgttctgcctgttctgtcacttcttcttgttctgctgcttcaacctgttctgcggtttgtttttcttctgacattgtgttcacctccctcaaatgctgtaaaaagatgactgaaaatgattgccaaaattcccttattcatcatacaaacttgtgaatgcttttgacaagtccgaagtcacgtgctgcagcaggctgacgactcttgaataattcatgcgcgtcggcccgataatggcgattgatccgatctgtttcgtatcaactgtataggtggccgtgattaaactgcagttttccatttcttcgtagtcgttttctttcccgattttgattgaaatcccggcttttgatgactgaaacagcttcagaacatcctgctctttttcaattaaagataagagcgagcggaccctttcaatatcatggaactccggctgattcagcatgttgatctttccgccgaaaaacaatttctcaacgtgggccgccggatggaatgtggagcggagcgattcaagtatgctgtcatagttggcgatatgctgccttaaatatgtgacaacctctttgaaaatgcgctcattcagttcgtccatcggcacgcccgctaatcgatcgtttagtatattgaccagtttttcaatatcggccaaatccactttagccgggaaattgatggtgcggttttcgacatgccccgtgttcgtgacgaggatggcgaccgccttatccggctggatcggaacgatttgaatctgtttaagatagttctcgctcagcgtcggcccgaggacaatcgatgtgtagtttgtcaggtcggacaggatttgcgctgatttttggactgttttttccagctcgaagattttttctttaaatatcgagtgaattaaatccagatcggtttttgtcagcttgacgggtgacagcaaatgatcgacataatacctgtaccctttttccgacggaatccgtcctgaggatgaatgggttttttcaataaagcccaattcctccaagtcagccatctcgtttctgatcgttgcagagctgaatgtaatctcgtctttttttgaaagagttcttgatcctacaggctgcgctgattgtataaaatcattaataatcacttgcaggatcaacagctgacgatttgttaacatcatcatcacccctgttagcactcaaggtcagcgagtgctaattctatatcaaaagtaacaaaccaaaagaaaaatgtcaattataactcacccaaaaaagcgccaaaaacctcatttcctaataatttgccctcatgcgttaatgcaaccgattcttccgtgtcacagatcaggcctttttcggttaaatctttgagaacatcgggaaacagttcgtcgaccgagcgtccgaatttatcgagaaaagcttgcttttgtacgccggacatttttctgagaccgaggaacatttcttcttcaatctgctcctcacgtgtcacctcgtgcgtgtcacggtaaggcagccccttttcttcgatgagctgcatgtaatgtttcacaggcccggcgttgacggtgcgcgtgccgctgatatatccgtgagcgcctgcgccaaaaccgaaatactcttcattgctccaatacgtcagattatgctgggactcgtatccgggctttgcaaagttactgatctcgtattgacggatgcccgcttcactcatctgcctcatgaccgtttcatacatctcggcctcttgttcttgcgccgggagatgcaggcggcctttttgcattaaattataaaacaccgttttcggctctacgatcagcgagtaaacggagtagtgctccgcatcaagagacaaagctgttttgacggaattgtcaagatcagccagcgtctgacccggcaggccgaacattaaatcgagactgatgttgtcgaagccgagagccctcgcacgttcaaatgaagtgaatacgtccttttgtttatgcactctgccgattttttgtaaaagctcatcttcaaaggtttgaacaccgaagctcagccggttgataccggcatttttcatgatttttaatttttccggggacaaatcatccggattcgcttccgcggcaaattctatgagtccgtcagaaggcttcagcacgcggtgaatggaatccatcaatttttccagctggacgggtgagagcgatgtcggcgtgcctcccccgataaaaatcgtgcggagatcagggcgtcccgtccgttctattgtatttatcatttccttttcgagtgagtttaagtactcatcgacaggctggctctgaataaaatatttattgaaatcgcaatagtggcagatatgctcacaaaacggaatatgaatataagctgatttcattttgaaacaccttcttctttacagaaagaagccgcagcgcgggactgcggcggcttccgttattttttcgggctgtcatccattttaagaacggccataaacgcttcctgcggcacttctactgagccgacctgcttcatccggcgttttccttctttttgtttttcaagaagcttccgtttccgcgagatgtctccgccgtaacatttagccaatacgtttttacgcatcgctttaatggtagagcgggccacgattttctggccgatcgccgcttgaatcggtacttcaaagtgctggcgcggaatgagctctttcagtttttctacaattacttttccgcgttcgtacgcgtaatcgcgatgcacgataaatgaaagggcgtcgattttttctccgttcagcataatgtccatcttgacaagtttagacggtttgtagccgatcagttcgtaatcaaaggacgcgtaccctttcgtgcttgatttcagctgatcaaaaaattcatatacgatttccgctaatggcatgtcatagacaatgctgacacgatttgcgtctaaatattgcatgtcgataaaattgccgcgttttccttggcaaagctccatcaccgcaccgacataatcgttcggcaccatcattgtcgcttttacatacggctcctcgattctttcgatcttttgtgggtcaggcatgttggacgggttgtcaacaacaaccttttcgccgtctgtcatatacacatcatagataacactcggtgccgttgtgatcaggtcgattttaaactcacgctcaatccgctcctgaatgatttccatgtgaagcatacctaaaaatccgcagcggaaaccgaatccgagcgcttgggatgtctctgcctcatattgaagcgatgagtcattcagttcaagcttctcaagagcttcccttaaatcattgtatttggccgtatcgatcggatacaaaccgcaatacaccatcgggttcagcttgcgatacccaggcaatgcttcggcagcctgattggccgcgcttgttatcgtgtcaccgacgcgtgtgtcaccgacatttttgatcgcagcagttaaaaagcctacatcgccgacagtcagttcatctgtcggagttgctttcggcgtgaacacaccgacttctgtcacttcaaactcttttccggttgccatcattttaattttctggcccggtttgaccgttccttctacgactctgatatacgcgacgactccgcggtacgcgtcataaagcgagtcaaagatgagcgctttcagcggagcttccggatctcccgcgggagccggcactttttctacgatctgttctaaaatgtcttcgatgccgatgcccgctttcgctgaagcgaggacggcgtctgaagcgtcaaggccgataacgtcctcaacctcttgacgcacacgttctggctctgcgctcgggagatcgattttattaatgacaggaagaatctcaagatcattatcaagcgccagatagacgttcgccaatgtctgcgcttctattccctgagccgcatcaacaacgagaatcgcgccttcacaggcagccaggcttcgcgatacttcatatgtaaagtcgacgtgtccgggcgtgtcgatgagatgaaatatatattcttctccgtcttttgctttgtatttcagctgaacggaatttaatttgatggtaattccccgttcgcgttcaaggtccattgaatcaagcaattgttctttcatttcccgctgggtgatcgccgatgttttttctaaaatccgatccgccaaggtcgatttgccgtggtctatgtgggcgatgatggagaaattccggattcttgactgcctctctaaacgcttttctttatctgtcacaatctatcactcctactattaaacgcaaaatacactagcttagattatatcaataggattgtaaacattcaattaaaacaagaaagagaaaagcttcctttaaggaatcatccgcttttctcttcatcaatgctaacggttcagtttcgaaacccactcatacatcgcctgcgccgagtccgtcacggtatttgaaagggtttctccgacttttgaaaacaggttgaaggtttccgcctgttccagctgtttttgtttttcttccagatctttcgccgtaacggtttgccccaaaatggaagcttctttttcctgtccttctccgccgccgagcgtgaatgctccttttaaggaagggtctttgtatcctttcatatcaagcattccgctgtttgcctgctgcatgccgaacaatacgccgaaaaacatgacaatggcgatcagcaggcatttgccggtaaaacggatcattcgaatcacctgatttctattgttttttcttctctcctgattgcgagctgaccttttctgcatcccagtacagttcgctgaacacatcggccacggcatctgatgcgcgcctcagttcttcaagattgttatccacgcccccgaattccagcagaagcgaccggtcgtttaaatcttggttgtatactccattatctcccggagagccttttgataaaacaccgacgcttaagccggggtattttttctccatcagcttatgaagttcacttgcgagtttatagttttcttcaaaattagcgctttttttgccgacgacgatggcgactctggcatagctttttcctttgatgtcggctgtcgtatttttcttgcggcgggaatcccggtgaatgtctatggtatattgcaggtttttatttttggcgagcgcgctttttacgaccggccttgattcgtcgtagcttcgcgcataatttaaaccgtctttgttcaggcgggcctgaatgtcggttttatctacggtcgctcctacaccttgcgcttcaagcgcttttccgaacatatctccgacaagcgtgacattggccttcgaatggcgggcgttatccggatttgtttccccctttaacagaggaagataggattcggtattatgagtgtggtaaataaaaacgacttttttgctgcctgttgaatgtttcggcggcgccgtttcttcttttttcgttttgttttcgatttctgccaggttcacttctttttctttttccatcacctttgacggcggcggagattcagccggcatattcgtataatccgtcccctgccccgccagaaggatctccgtatcatattgggcaaatcccggcagctcacgtcccaagaaactccgcgggtcttccatattaatgcttgtcgccagttttaaggacagccgggacagctgaaaagagtctttttcaggaagctctgaggcgaaataatgattttccatgccgaggaggtgtgcaaacgcgtcacccggaagttctccggcaattccgtgaagagaatccgaagaaagcctcagttcagggcgaagcgatgtgagcacacccgataatacgaaaataacgataaggcttgtcataaacaaaaacatgcccttgagcgcatttccaccgtttactgcaacgacaatttgacggtttctgcgtttttttctcatgatttgaatccctccagcgcttgtctagtaattactctatgaacaagctagaggaggtagaactcattttaatgattataagaacctttgttatcttgtgacactttttcatgaagggcggtgtttaacccgtttgcaagtacgttcgccatatcatcaataaaggtgtcaatctccttcggcgtgaccatcagattatggccgagcggagaaagcacttcgtgaatcagctggcgtttttcgttttcgtccagcgtgccgacaataccgagaaaggattggcgttctttttctcccggaaggtcttcgtctgtcagcaccttctttttgccgaagttcattccggcgggcaccagagatcttgacgggctgtcatctttcatctctcttccgaaatgttttaatatataatccaccgtatcgcttgcgatcgtaaccgcgtcaacaacagtcggtaccccgattgcgatgacgggaatgccgagcgtttccttgcttaattcttttctcttattgccgacgcctgatcccgggtgaatgccagtatcagaaaattggatggtcgtgttcaccctttcaacggctcttgccgcaagagcgtctaccgcgatcacaaaatccggctttgattctttgatcacaccttgaataatatcgctcgtttcaattcccgttaatcccatcacaccgggagcaagcgcgctgaccggtctgtacccttcctgcacgttttccggctgaagcctgaacagatgccttgtcacaagaaggttttcggtcacgagagggccgagcgcatccggcgtcacattccagttgcccagaccgacgatcaaacagcttgcatcctttggaatctttaatgccgacagataggcggaaaattcctcggcaaacacttccgttactttttcctgcatgtcagagtcgtgttcccggaccccttgagcctcgatcgtgacatagcgtccctgctttttccccgatagctcggcgccttctttggtaatatcgacggttctgactttaatgccgcccttgtcgcgttctttttcaataaacccgtttatttcttttttctgaccggcttgtccgtcttttaccgcctgtttcgtttctaccgctaaatccgtccgtatcagaaattgattgacatccagttcgttgtttttcacagggaagacctccttcaatcatcgtggtacatagtgtggccatttacaaaacgaatcatgcgaatttacccatcaacgaaaaatactttacatttatattgcaatctaaagttctgtttgatagaatacaatttgttctattgtgaagaagatttaaccttaagacactgtgctacaggttgtatcttaggaggtgaaacacatgccaaacattaaatcagcgattaaacgtacaaaaacaaacaacgaacgccgcgctcataacgcgacaatcaaatctgctatgcgtactgcaatcaaacaagttgaagcttctgttgctaacaacgaagcggataaagcgaaaactgctctttctgaagcagcgaaacgcattgataaagcagtgaaaacaggtcttgtacacaaaaatgccgcagctcgatacaaatctagacttgcgaaacaagtgaacggactttctgcataatacaaaaacgatccctttaaaggggatcgtttttttcattcagtccggagaagctcaaggagaaagagctccagcaagagctgcttgtcctttttccccgttttcatttcataatccatcactgcgagtctttctataatacgccgcagctcttcttcagaaaaaagcgtcgcctgatccatcgccagttttacccggaaggggtgcacctttaagttggaagcgatttgcttttggccgtatccttgtcccgcaaaatactttgtctgcataatcagacggaattggttggcgatcagcgccataattttgatcggttcttcgttttgttttaaaagatcataaaatatttgaagactttccgtccgttttcggttcacgattttgttgatcagctcaaaaatattctgctccaaacttcttgcgacgagctcccggacatcttcaagtgtgatctcatgtctgtcaccggtgtaggcagagagtttttgtatttcctgatatatggatgacagatggccgtttgcaagcagaaccaaatgctcggcagcttctgtatcgatcattttattttcggatttcgccagattaatcgtaaaatcagttgtctcctttgcattcagctccttagcttcaatcataagggctttttgcttcagcgctttcgtcagctttttccgttcgtccagtttctcatacggagccacaatcacaaagaccgtgtaaggtgcaggctccttcagataagtctccagagcggctgtattatgctctattttttctttctttttttcccctgttaaaaaagacggattttttacgatgaccagccgcttctctcccataaacggaaacgtttccgcatcggttacggcctggtcaagcggatcctcttcaagatcaaaaacagacaggttaaaatccttagtctcctcatcaacgacagcttgtctaatccggctgacagtttcttggagcagatacgtttcttttccgtataagcaataaacggagcggacatccccttttttcagggctttccaaacatcaaataccatgatcgtatgacttcctctctttcttgatccccttctatcctaaattgagtttggcaaatagtaaagaggaagctttaaggacagcttcctcatttataataaacgcctgattcacaagctcccgggtctgcttgtaaaaaggcgataatcacaagaacagaaaacgttaccatcacttctagatttttcaaaacaattccagtatacttagggaagtcaggagggatgaaattgaatgattttgaaaaaaacgttcaaagcaaacgaaatgatgctgttgactcagctgtcggttttgtcgtgtccttcggatttttcgcctttttgttcgtgatggcaacagccatccatcttatcggctcttagccgcattccgggctgctgtcaatcggcagtcttttttacttcttgcgccctggtttcttctatatcatatggagggaagacggaaaacgttccggcgccttttttaaatctgtattgaatcgttccgctgacatcggtgcgaagcacattgacagagtacgccttcaaacgatccagcacttcttcatgcggatgatggtatcgattctcttttcctgctgaaatcagcgctgcttccggctgaagctgcttcaaaaaggcttcactcgttgagcttttgctgccgtgatgacccgccttcaatatatcagccttcagattcggatacgttttcagcacttccgtttcgccgtccgattctaaatctcccgtcaaaagccagctcactccgccaaaaaccgtccaaagcaccagtgacgaatcatttttactccttccgtcagacgactccggagacagcacctgaaactgaagatctccggctgtaatggtgtcgccccgctttgcttcggcaacgggaatgttgttttctttcgccatatttaatatgttctgatctttcggttcttttacgaatcctacggggacaattaaccgtttgactctatgatttttgattaacactccggcttccccgatgtgatcttgatccgcatgggttaaaatcagtgcatccagctttttcaccccttttccgtttaaaaacggaatcaaaaccttctcgccgatagaatacgggtggcgtttttctttccatgattctccgggataagcaatcactccccctgtatcaaccattacggtccctttgcggtgcggcgcgcttataaacagtgagtctccctgcccgatatcaagcatatccgcttctccccatggactgaaatacggacggcatattaaataagctaaaaccgcgcagaaaaaaagagccgatttcctgagttttaaaaaacctcccttttccaaagccgcaaaaagcgtaaaaacggaaaccgcaagcagaagaagggaaagaaagtcaggctttgacacaatcatagtaaataaatcaacggatgccgcatatgtaatgaaatcatgcacaggcttcatcacaaggtcaaacataccaaacaaacattctcccatctgccttgagagtaaaagaagaaggaaaccgatgacagaaaccggaatgacaaataacgtataaaatggcaccatcaccatattcatcggaaaactgacaagtgaaatctgctgaaaatgatagagaagaaacggaagtgagctgagctctgcaatcaatgaagccatcgcaagcccggcaagtctgcttttcccagctttctttaaaatggaggatgacagaattaaagaggcgcttactgcaaaggaaagctggaagcccgcctgccaaaggaagtaaggattaaacagcaggagcagcagataagacagggacaatgcagcagaggaatgaatgccgcgtttaacaagagttccggcgatataaaatcccagcatgagggatgcgcgcaatacggatggggcggcaccgctcagcagcgtatacaccggcaaaaacagcagcagcaaaattcccgctttttctcttgtcagcccgattctgatcagagcataaaataatcccgccgtaataagaccgacatgcattccggaaatcgccattaaatgaacgactcccaaattttgatatgcactcagtatatcgtcctctatagaaaatctttcacctaaggtcagcgcttcaacaattccggccgaagattcaggcacgtgattccgaatgatcgaaatcaaattttttcttatgttcagcagtttaaacagcggctgtttggatttttcacactgctgaatggaagtcacggaaaataaccagtgaatctgctgagagtaaagatattcattataatcaaaacctccgggaaccgtcgcatgtgcaggctgttccagagagcctgtaaacgtgcagcgcatccccggttcaagctgttcaatgagtcttttttcctcaagagaacggattttgtacgaagccgcccatttttccttgtcatgtgtacggataacggctgacattttcgctccgtcaaccttcggaatattagcgatgacggcctgttcagtataactgccggcctgatagcgcgttacattcgcagcgtcacaaaccgtataaagatagaaataaagacaaaaagaaacgaggcagacgataaccggagcatggtgctttgtttttacaataataaagagaagatacagaagaaaaaggagcagaacccagaagacatgagcggcggcaattcccgcagttgcagaaaccgccgccagaggcagaagaaggtatttatatttcatttatacgtaactggtaaacagctcattggcctgttcatgaatttttttcagttcatctgccttaacccccgcatcagataattgctgaatcagacctgctacaaaagacaatttttcgcggtttttcagatcgatgatcatttcatcaagttcgacctgctccaccttgactccggcttggctgaacagctcttttgcataaggctgtgttttgtaatcttcggcataataaaccgttttgatgcctgcctggataattaatttgcagcattgaatacaaggataatgcgtcacataaatttcggcgccctccgtcggaacaccgaacttagaacattgcagaatcgcattcatctctgcatgtatggtccgctggcaatgattatctattaaaaggcatccttcatcagcgcaatggacgccgccggcaattgagccgttgtatccgccggcaatcatccgcttatctctgactaccgttgccccgactgacagtctcggacatgtgcttctcagcgccagcaaatggctttgcgccataaaatattgattccatgagattcgttccacaagtgttccctccaaaaagtcttgttgcttttctaagtttacatagatttaagcagaaccgtcaattcactttaccgtaatggaagtttttatccgctcaaatgacttttctccaaagcctgatacattcatcaaatcttcagcagtctgaaaccgtccgttttcttctcggtatgcgataatcgcttccgcttttttctgccccaccccggaaatcgcctgaagttcgtccagagatgccgtattgatattaacagctgcattctccttttcacccgctgctgttttcgggcgattctcctcttcgccttcactcggaatataaacaatcgtcccgtcctgcagctgctctgctaaattaacattcaattcatccgcctttttcttcaggccgccggctttttcaatggcttgcgtcaccctgtctcccgctttcatttcatacacgccgggatttcggaccgcacctttcacatcaatcataatcttgtcggctgcggtgtcttttttgtccgcgacggatgctgaggctgtttggccgagcacggactgctgtttgaccggctcttccttgtcagaacgaaacagccaaatacagataaaaaccgcccctgccgcaagacaagcgcccagaattttcaggttccgccgcagccgctccgtcatcatcgctttcgtcatattgcattgcctccccgcataaggtttagaggattaagggaaaaaggaggggaatttattgaaaataggctttatcggcaccggaaacatgggaacgatcctgattgaatcgtttatcgaatcaaacgctgccgatccctcacatatcaccatcacaaacagaacaatcgaaaaagcattaaaactaaaagaacgtttcagcggcatccatgtcaccgaggatcaggaaaagctcgtacaggataatgaaataatattcatttgtgtaaagccgctggatatatatcctttgctgaaaaaactcacaccgcatttacggaaagatcacattttaatctccattaccagccccgttcagacggatcagattgaacatacggttccgtgtcagacggcccgcgtcattccgagcattacgaaccgcgccttggccggcgtctcgcttgttacgttcggcaaaagctgcagcgagtcggcaaaagcggatattcaaacgctgttcactcatatttcaaaacctgtggaaatcagcagcggcattacaagagcggcgtcagacattgtcagctgcgggcccgcttttatgagttatctcgttcagcgctttattgacgcggcagtggaagaaacggacatcaccaaagaagaagccgtgattatgtcgacggaaatgcttgtcggtctcggaaagcttctggaaacagggcattacacacttcccgccttgcaggaaaaagtatgcgtaaaaggcggcgtcaccggagaaggactgaaggctctcgaaagcggtgttcaggatatgttcaaccgtgtctttcagcgtacacataacaaatacgatgaagatatatcgttagtgaagaagcaatttcacgtgtaactgagtatgccataaagtgctttatcgcgccaatcgcaaaaaatgcattttaaaaaccatcgttccgtttaaacgatggtttttggtttgcctgccgtgaagaaaagacgttcagactctgttgaaggaggccggtctgtaaaatcagccgtcaccttcttcagttcaaatccggtctctgcaagcatttgttcatattcttcaatgtaaaatgttttttgctcatgcgtctcgtcatagcggtcataagattgtccgttccatacgaaaaaggacatatcatggatgacagaaagctcttcatcgccggcaaagctttgccagatatagctgatctgctcatcctgatccgcatgggtgctgtccggaaaaagctccgtcattttatatggggaatggacgtcaaacagaagcaggccgccttccttcaaaacttgaaaaacacttttgaaggtgcttaagacatcatttttcgtttttaagtaatttagggaatcacagcagatgacaacggcatcaaactgttcttcaaaaccggaaagctctctcatatcctgctggagaaaaagaatcggctttcccgtttttttctgctgggcacagctcagcatatcttcactcaaatcaatccccgtgacttcgcagcctttttcagcaagcctgatggatatttctccggttccgcaggcaagatcaagcacccttcccttttccggaagagacgcttcgatccagcccgcccattcatcatacggcgcatgtgacattaactcgtcatatacgccggcgaagccttggtaaatcatgagttcaagccgagttcaagctctgcgagcggtgcgtcgccccatagcttttcaagattgtagtagcttctttcatctttatggaaaacgtggacaatgacgtcgccgagatcaactaaaatccagcgggcctcatcaaacccttccatctttttgacatcaatgccgttttcttctgcctgatctttaatttcacgcgcaattgcctgaacctgcttatcagaattcccgtggcagattaaaaagtaatccgctataagtgagattccttccatgtccagcgctaaaatatcttctgcacgtttatcgtcgcatgcttttgccgcgatttttaatacggaagcttgattcattctttaaattcctcctgtcaattttgagacaccagccaattataggttgcaaacgtctccggaaagaccggctggttttttttcatcagaaatatcattgtatttttcattgcttgtatgagcgcttcgttcagatctgtttccgccagacggcgcacctcttccactccggggaaatggcgtccgggttcaatgtaatccgcaacgtaaatgactttgtctaaaagggtcattccgggacgccctgacgtgtgatagcggattgcatccaagatctcaggatcagtgatccccgcttctttctcagccaaatacgctcccacaggggcatgccacagctcggcattgtaatccaagagctcagccggcattttttcccgcacgatgatctgcttcatttcttctttcggccggaatttcgcataatcatgaaaaatagccgccatttccgcttttttcgggtctgctccgaaccggcctgcgagaataaccgccgtatctgtcacgccgattgtgtggatgtagcgatgctcggtcagctgctctttgacgcaggcaagtgcttcctcacgattcatataaatcattctcctctatatactgcctcactttatccggcattaagtattgcgtcggcttttttgctttgagacgttctctcagcatcgttgacgaaacgtcaaattccggaacgtcggcaaaaagcagcgggtacggggtctcaatatgataccccgggcgccgcactccgataaattgaatgagcgtgagaagttcgtccagtttgtaccatttcggcagatattcaatcatatccgccccgataataaagaaaagcttgtcgttcgggtgccgctccttcagtaaacggacggtatcataggtataagaagggcctttccggtccatttccgcaagctcaagcttaaagccggaattagagcttatggcaagcttcagcatctccacccggtgccggctgtctgtaaagtcttcattctgcttatgcggagggattttattgggcataaaccaaatctcatcgagctccgcctgatgaaggacttcattagccatcagaagatgtccgttgtgcggagggtcaaatgtgcccccgaatattccgattttcttcatgtcaaccaccttacggaagctcgatttgtttattttcctttgattccttatacaatacgatcgtatttccgatcgtctgcaccaattgtgagcggctgcctttcacaagggcttctgcgacatcatttttatcgtcttcgcagttttgaagcacgctgactttaattagctctcttgcttctaaagcctcggcaatctgtttcaccatgttttcgttgactccgccttttcccacttgaaaaataggcgttaaatgatgcgcttttgaacgcaaaaaccgtttttgttttcctgttaacattgtgttcctcctagttttccttcaacaattgctctcattaagccgctgtcaggctcttgtcccgtccacagcttgaaagacagtgcggcctgttccacaaacatgccgacaccgtcaagggttgttaaacctcttttttcagcttcttttaagaacgccgtttgaatcgggttgtatacgatatcacaaacgatggttcccgttttggcccgttccaatgagagcggcacggcatccgttttcggatacatgccgacagatgttgtatgaataatgacgtcatattgttcaagctgattttcagcttcttttaaagtaagggcgcgtttctgctgaaaagagggagcagccgcaatcagactttccgctttttccggcgtgcggttgcaaacgtcaaattgtttcggctctctgcggacgatcgtcgtaaaaatcgctcttgccgctcctcccgccccaatcataaggatggagagctctgatatcggtttgtccaatactttgactaaagatttataaaacccgtctccgtcagtattatacccgatgagcctgtctccctctcttttgacggtatttacggccccaagtactttcgcgctttcatgtatttcatccagatgctccatgatcgcgactttatgcgggactgtgacgttcactccgcagatgccaagcgccttgattccgttaacggcgtccttgagatgatgaggttccacctgaaacgcaaaatactgcccgttgatgttcttatcttgcaaagccgcgttatgaatatcgggtgacattgaatgcccgatcggatttccgattactccgtacaattgtttcatgctccctctccccttctctctatattaatgaacggcggacaaatacgtgtacgcctttcggagcgtatgccgttatttttttatctgcttgctgcaccgtgacccagccgagaccggaaaaaacgatatccgtctttccttctttaatcgaaaacgtatggggtgtaagctccggaaattcatccaaatgatcttttccgggcggggtaagcagttctcccgcatgcttttcgtataaggcatcagcattttcaagctttgttctgtgaatcatcaattcattcggcatatagcagacaaacgccgttttatcgcctgatacatagtcaaaccgggcaagcccgccgaaataaagcgtttgtttttcattcagctgaaaagtgcgcggcttcagttcttttttcggtgtcagcacctttaagtcacgcttgtccacgtaatgcgccatctggtgatggttaatgattcccggcgtatcataaagcgcagatccgtcatcgagcgggatttcaatcgcgtcaagcgtcgtgcccggaaattgagaggtggtaataatattctcttcccctgagacctctttaataatccggttgataaatgtggatttgccgacattggtacagcccaccacatacacatcgcgcccttcgcggtaatgttcaatggcgtcaatgacttctttcatcccttgtccgcgggaagcgctgattaaaaagacatcaaggggttttaagccgtattctttcgcttcgcgtttcatccattgaacgagccgttcccgttttacggatttcggcaggatatcggccttattaccgacaagaatgatcggattaccgccgacaaagcggttcagcccgtttatccagcttccgttaaaatcaaaaatatcaacgactttgacaataagagagtcagtatcgccgattgtgtgcaagatatttaaaaagtcatcatccgttaatgaaacatcttgaatttcattgtaatttttcagtctgaagcagcgctggcagatgacattctctttcgtgagcgatgcctttggcgcgtatccgagaccttgttgatcctcggtctggatcgttactccgcagccgatgcaaacaaccttttccatttctaatcctcccactgaatatggcctttacgtttcaaagaactcaatattctccgttcaatccggcggttaaagcgcgtcatgactccgtcagaggaagcgacaggcacgacgaggatcgtatgatacccgtttctgtttccgccgagaacatcagtaagcagctgatcgccgatgaccacacagtcttcttttttcagatccatgctgctgacggctcttttaaaggcgcgccccatcggctttcttgccttataaataaacggtatgccaagcggctccgagaataatttcactcttcgttcattattattggagacgatcgtgactttaatgccgtgttccttcatttcttcaaaccactcgattaatcgaggagtcgcactcggtctgtcccactccacaagcgtgttgtcaaggtctgtaataatccctttcacattgcgttctttgagcttttccggtgtgatatgaaatatatttttcacaaattcgtcaggtaaaaaaaacttttttaacaaaacccgcacccttccttttctttctatcatctatatgtcgaaacctgtcagatttaaaaacaaagtcggactcagtaaaaaaatttcgacaaaaattgggtttcttcaccagttgtggataaaattacacacattatccactcttattacatccggatttatccagattataaacaagatactaacaagttatccacttacgagtgtggataacagaacgattgttcttatttgtatttcatggtagattaaagataacctcaccatgattgaaacgcaaccttccatcatatgcttgcgtctgatgattgattacaattgtaaggaggtgccactcccattaattgggtccccggcatgagaaagctttctgatgaattactaatagaatcttatttcaaagccaatgaaatgaatttgagccgtgaatttatcgagttaattgaaaacgaaatcaaaagaagatcgctcggacacattatttccgtttcttcttaaacagaaaaaagttcccgggcgaatttcctttttttactcagatgactgatattatatcacttcggttatgcgcattactaccactttcaacaaaaaacacccctaaaatagaggtgtttaagaggacggctgctatatattgaaccaatacagaccgcccaggacgagaatgacgacgagcagcacaacaaaaaatgcgtaccagtaccccgcattcacccgaggaggcgggcatacaggatattgcggagggaaaccgcggttcatagcaatcgcctccaaagagatgtttttctacagcctatgaagcagaagcaaaacggtttaggcagctgacggcgtcagcgttccaaaacccgcccattttttatgccttcaattaagattctggcgccttttggcgtcatatgatttccggagggatctatcagtccggattggatcagcgcccggtctgtatctttgccgccgtccgcgcgtataaagtgtttccagttatccaccagcggcactttcaactcagctgcaacctgcctcgtaacgccgttataggaattatgccattttctcgcgccgcctttttctttaaaggctgaggctttatatctcgaatagtaatagagatgatgcgttccgtttccttctataaccgggatgcacgtcattaaaatcggctttatgccgtgatttctgctttcgtttatgaaataagtcaggttttctttaaaccgtttctttgatacccgcggctgatcgcccgtcaaaatgcccgcatcatttgttccgaacatgataaataaatattggggcttacggtccagcacgtcgctttgaaagcgcaggcgcgcatcctcagtcgtctgaccgcctattcccgcatttataaccgtaagacggccgcgttccgctgtttttaaaatgtttacccactgctgcgccttcggataatcacgataatcccagttggaaccgcgcgtattgctgtcgccgaacgcgacaacacttttttctttgcccgcggcgcatcctgataacagacagattatcgtaataaaaagaacagcaaacttcattttctctccccccaaaccttacctcctatggtacacatctctttggcggctttcaacgcggcgctctctttactgaatatgaaaaggaccgggatcctgtccgatcaaatccgaaaccttaacaaacgtgtagccctgctttttcagcttgggaatgatttctttcaaagcctcaaccgtctggcgccggtttcctccgccgtcatgcagaagaacgatatctccatctctggcatgtgaaacaacgtgcctgacgatttttcctttcccgggccttttccagtccctcggatcttggttccatgaccacatgatgatatgatagccctcttttaagatgcttttgaaagccgtatgattcagcgaccctcccggcgggcggaataacttgtccccttccggctgcagcgatgtgatatgatgcgcggagctgtgaagctcttgtaaaatgtctttgcgtttcagtcggtgaaaataaacatggttcatcgtatggttgccgatttcatgcccttcttcaacgatgcgttttgccgttatggggtatttgtctatacggctcccgacacaaaaaaaggttgctttaacattgtgctgtttcagcacgtctaacacagcctccgtatagacaggatgggggccgtcatcgaaggttaaagatagtttctttttttcagaccttatatcccagtacacgtttcccgtcttctccatgtcacttctttttaaagatttcgcatcggcggacacggcagtgagactcgtgaggacgcatatcatgatgatcagatgaaagcagctcaacgtttacacctccagtaaacactactgttaacgtgtccccttttataaaaatcattctctgcatcaaatgatgcacatcacccgcttcccgcttgtttttgtccaaacccgggtgccagccgtttctcatcaaacggcaaatgctgataaatcaaatacgcttatcggacagcttattttaatagaaggagatagatttgtgctgtatactaattgacaagaggtgaacgtgcagatgataaaaaagggattcagtcttgccgtcatcattgctgtcgtgatgatcggctttatgcaaaaagacgtctggctcagcatgattcgcgcgggcggcatgtacgccgtgcttatgagtatccttctggtcgcagctgacgtattttttccgattgttccattcgccattatcgcggccttaaacggagcggttttcgggattgtaaacggggtgtggattacattgtcaggcgcgatgctcggaacaatggcgttgttttttctcgttcggtacggattcagagactgggccagaaaaaagctgctggcttacccggcagcggcccaatatgaagattcatttcatcagcacgcgtttacggcggtgcttttcgggcggctgattccgattataccgtcgcttgccatgaataccgtctgcgggctgagtaatatccgatggccgatctttttttctgcgtcggtgctcggcaaaattccgaacattgtgatcgtgaccgtcgcaggcgcttcatttacaagcaacaaactgctgtctttcgggatttacggaatgtatatgctcgtcttaatggcggtcatttataagaagtttcccggccttttaaaaacaacgaaaaaatgaagcgcgtaccgccccctattccggcggtacggctcctctcattctgagaacttttccgttacattctgaaccgatcacttccatgtttttctttctgtaaaatgacagagccgcttcattgcccggcgaaactctcaggtgatattccgaaacaccgttcgctctgaaaaactgattcgcgtattgatgcggtttcgttccgcacccccttcccctctgcttctcagtcatatagtaaaggtgcacataaccggttttttggctgcggtaaaatttgatggaagcttctagctgtccgatcggctgtccgttatgaaaaagcagcataaaaccgtcgggaaagcatttgatttgggatgacagccacctgagatattcatccctattaaaatgatccgccgtgccaaagctgacgaaaaacgaatcctcaccaaacgaaacggccgtctctttatgtttgtttacattgatccgcttgaaatacatcaggagtcctccttcttgcggccgcaaataagaacgagcataaaacggctgccaacgccagcataacagcagcgcctgcgatgacgatgccgcggacggaagaactgacagaagccgctccgaaaaccgccgttactactataatgaagacggcttcgactaatgaataaaagctccccactctccccatgatgtccaccggaacattcttttgataaaacgtcagaaagcctgtattggcaaacgccagaaaaaaagcgagaaggaaaaatccgaaagcagccgtccaaaaaacgtcagaaaacgcataaatcatatatccggccgctgtgaataaagagcccattcccatcaataaagaagccggcatttttttattaaagaacacattgacaagcgctcccgcaataatgcctgcccctgagacactgacgagaaaaccgtaatcggcatcagtcagctgaagaacttcttttgcaaaagcggcttcaagcgaatcaagcgcggatggcataacggtcatgaccagactgaataaaaaataaatgatcatgacgtttcgcgccgttcggctgaagcgatagacgagcttccaatcttctttgcacactgccaaagaaagcttctgtctgggagaatgtacgtgaggctcattttcaaggttcggcagcatcatcgtgatgaaaccggacagcactaaagcccccgcattcacccaaatcgcaaaaatcggcgtgccggcgataaaaagcagcccggccgcagccggcccgaggagaaaagcccctgattccgacaaagcccttagtgaattgaatcgttttctcctttcagccggaataagcatcgtcacatacgccatggaacacggacgaaacatcgcattggccatttgaatcaaaaacacgatacaataaacggaaaataaagaccgtgcagtaaccatcagcggcagaacggcaatgaatgcagcccgggtgaaatcaagcgacatcatcatattccgtttgttacaccggtcgatgatgctgcccgcccacccattggtcattaaaacagccgcaggcctgattaaataaaggatggaaaccgcaaaagcagaccccgtttcttttaagacaataagattaagagacaaaaaatagatccattcaccaatatttgctatcccgattccggttaacagaagcaacgggtaccgccaagacttcaggtttttcatcttatccctcccttagaaataaaaaacgccctcaagacaataaagtcttgaggacgggaaacagcccgctatgccacctcaattcggtttggtgccggccttgccgggtacaaagcttactcggtaacaggagtatccgccgcatcatcgtcgtgttgcatgattccgatgcgaagctaagaggtttgtttcaacacatccattcatactccttcacagctcccggagctctctgtcatgaatgatatctgtctactcgtctcttcagcgcttttcggctatattgttttcacccttactttttttaacaatatacaggctcaatcatcaaaaatcaagaggctgtaagaaataaaacccgattttgattaatttccctgtacagacacaaacagcctgactgccacatacagttacatataggcttttgcctacataactttgtggaggtgaggacggtgacaggtgtttttgcagcgctcgggtttattgtgaaagaacttgtgttcttagtatcatacgtgaaaaataatgcctttccacaaccgctctcaaataatgaggagaaaaaatacttagaccttatggctgaaggagatgaacacgcccgcaacatgctgatcgaacataatctccgtttagtcgcccatattgtgaaaaaattcgaaaacacgggagaggacgcggaagatctgatctccatcggtacaatcgggctgattaaaggaattgaaagctactcagccggaaaaggcacgaagcttgccacatatgccgcacgatgtattgagaatgagattttaatgcatctgcgcgcattgaaaaaaacgaaaaaagacgtctcccttcatgatccgatcggccaggataaagaagggaatgaaataagcctgatcgatgtcctcaagtcggaaagcgaagatgtgatcgacaccattcagctcaacatggaacttgaaaaggtcaaaaaatatatcgatattttagacgaccgcgaaaaagaagtcatcgtcggccgcttcgggcttgatttaaaaaaagaaaaaacgcagcgcgagatcgcaaaggagctcggcatttcaaggagttatgtgtcgcggattgaaaaacgcgcattgatgaagatgtttcatgagttttatcgggcggagaaggagaagcggaagaagaagggaaagtgagcgaaaagccggatctgacatcccggcttttcctattttatctttttcaatcatgactataaacagaatatgcgtagcgctcagtatgaagggataaatatacaaactgtttaatcgcgtcaaggcctgtgatgaattcatttgtcatacggccattttcaaaatcaattttgtaggtttggagggctctataacttcgctgtcatcttcaatatcatcaattcaatttctgaggaaaggggcatgataagatcactcctataacgttcctccatttattgattgaatgaaccataataaaaaccgctcctaaagagcggttttaaaatataagaaataatcattctaagaagaaatcgaaagggatttatttactgctttttgagcatggattaaagtcgtatcaaataatggcacctctgaatcctctacctttactaatagtccaatttcagtgcatccaagaatgattccttctgctcctctatccaccaaattatttatgatcttcttataaatgtttttggaagactgtttaatttcacccagacacagttcttgataaataatattatttatcaattctctttcatcatcatcaggaacaatgacattaatatcatgagacgcaatacgtgatttataaaaatcttgttccatcgtatatttagtacctagcaatcctactgagcgaatgtcttgtctaataatttgttctgcagttgcatcggcaatatgcaaaataggtatagtgatcatttcttggatatatccaagaactttatgcatagtatttgtacatattacaataaaatctgcacctgctttttctaatgatcttgcaacttgacctaaagcttcacctgctttatcccaagctcctatggattgataatgttcaatttccttaaaatcaacactgtataaaaggcattttgccgagtgaagccctcctaacttcttttttatttcttcattgataattcgataatactcagctgaagattcccaactcattccgccaataagaccaatagttttcataacccacctcggatgaaattttcaaaatattatagttattctatagcatagattaggtctttacaattatttattttttcaggattattatcataaattttatcgagaataaaaaatgattgcccgccctttaaggagacaaccatcaaattcccacccattttcagtccttcatcttctccagagcgccaccgtttaggaataataatcaaatcagcaggtattattaatttgtcatttccattatgccttatttcaatagatgaaacggaaatcacttcagccggcataatatccaccggtgactcagaatcaataaagtcagaatatagaaaaagagatgtgacagttatgaaaatcatttttctcattcgttactgcattttggtatcaaatgatttgacttataagtccttaacttggtcctctctcaaacgattcaacgcgggacgctctaaaaagctcctcagaaaatccttcacaggcatacctcagtccctgctttctatatgcagaagatgcgctcgcccagctcgaagaagccaaacagcacattgcccatttggaacaaaaaaccgccctatatcaagccattctggagcaccgctcttttgatacagccaatcccgccaactgggaaaaaatacagcatatgcatagtgacgtattttactcgcccactgtccggtaggtgtgaaagatatttatgagcacatcaatggctcttaaactcctaaattggaatccatattgagtatgctaagtttgatgacatattatgagcgattaaatttgtttatacggctatagggctgcaagtccttaatttttttcttaaggttactttctattaattagaaattgatagaagtcgcatctgtatgcgacttcttgttcgatgttattttcaagtgtgtcagttgtttccacgatttaatggtgttcactgacactccgtacttctcggcaaggtccttgcatttcatacctttaaggtagtctttatgcgcttgaatgttcttttctgccatctacatccaccgctgcctcctttgaattgagttgttttggaagctaatttctaaaacaactcaattcattacgttgactaaattgcatattctgagtattaaaaagtacaaaaaaagataccctttgaggtatctagtttataaagtactaaaagaagccattgacataaaaatagagtttaagtgtctattgtccttatttagatcaacaacttcttcgaggcactgctcataaaatttagttccaattccggttaacttccttattacgtgttcattcatttcatgtttcaacatatttaccacggagtattttattagaccatttaaatcacttctatctatactattctttaagaagttagccgtatcagctgtaatcttttttaattgctctccctcaaattcaataagtaaaaaatcgttatcttttttaaaagtaagttcatttgctaattttaaatatttttcaaattgatctctgaaattattaggtaaaggcacagaataatcatttatctttaaattgttatatttaaggtctagattattttttttcaagttgcaaattatttcatagcgtaccccagttaatattatcaatttaatgattattgctgatctaaatttattaaaatatcttttctcttcaaaggcatttatatatatatcatctgaatttaatgtttcatcacattgcttaatgagatcattaacctcttcttcaagtaatgtattaaaaccgctactgtcttttaatatagagttgtttgagataaattcattcattttatatctatatgatgaatgattgctagctgataaatttaactctctttcaaagtcgaggttcttgatacaatgttcagattggagatacataaaaaatttttttataacaacactatacatataagcagtttctttttttaaaatttttttcttgctctgtgatcgattttcaatattgaattttaaagaatcaattatcctttctgttctaacaccttggagaaaatctataattgtatcatcagtgacctttaaatgtctcagataatctttaaaagccttcaaatgagtgaaatatgtataaggtacactttcaagaaaagactcaaatatttgttccattttactcatctcccatcttattatcgacgaaaaacaataataatggaaccatttgcaaaatttgtcgacaaaaaagcaccctacaggatgctttattttctgctcttgatgtaatcttccttactgatacctaaaagctccgcagaatgctcatcagctgaatgttctaaatggtgcatttggtatttaacgaattcttctgtaaatacctttttgccgatgagaatatcaataagagcttctattgtacattgacggtttaccgatccgcatgctaactattctaacaaatgttgttgattaacattaattgttcttgtcatgctttcacctcctaccttaatatcggcaagagattatgacaaagaacattgtgcagaatttgtcgaacgattatgcattacacagatccttttttatattaaaattatttcaagctttagtaagctaggtgggcgcggctctcacggttaatccgaccaagtcgaaatccttactcgcctagaggggggtgtggttatggaaatccacatcaaaatttcccgagagtttgcagtcgctattttgattgcaatcgctcatgcctttctccgttaggagaaaggttatttctaacgcgaatgattcgcatttgacgctacaggttttttcagattcaacaaacgctcaaagtagcaacctgggtataaatggatgatgaactcatctttcattttgcgtacagtttcccttgaaatgccaaggtgaaggccaatagcacggtaactcaccccctccctcatgcaatcataaataactttgtgttgctctcctttggtttttccggcgcctaactcaactgcatatactcgttcctcatagtatttaagacgtttgaaaagacgctcttctctcatatccatttgtcgcaactcagcctgactcttcccaagacttccttttggcatagctgcttctaatccatattgagcaacaccctaatttttcataggaattgttgaaccataaagtaccctttgcaatcgatgaacatctttcaccatccagtgatagctattgattagattttaaatgccttttcgattcatgaataggtcctccttttccaaataaaaacgacactaaacaaacagcgtaaataatactataagttcagtgtccacaggctctccgtcttgggcttaatcttttaaatttaataataaatcattcaaatcgcaaataaatttgtaaacaacttcgtgaaattctttgcaaaattccctatttagtatatgtattctgtcacggtcatcaatttcaatataattgttttttccaataatttgaattaattctttttgctttgtttcatctggtatcattgttattattcctgaattgtgaatataacaatttctaatcttagaataatcaactattttattccaaacattgttcgagaatatttctgactcattaaatttctcattacttttatatcttaatttaaaataacttttggctttaaaaatccctctatcatacttaactttgtctaaaattgctttatctaaacatctgcttataaggtggtactctataaagctatatatactcgtgaatacactacttctcacaattgaaggatatgtgctattgaagtcatgatattcatcaatataataatcccaataatcttcttcaatttctgggctcaattcttttgcttcattttcataccgcatttttgatttttcaaatctgtcttcaacatcatccaaatattcaataaactcatttaaaggtgacaaaacccttaaatagaaagcaacacctgattcctttaaaaacatactatcctccagcgtttttgtttattttactacaaaaccactttaaagtgcctttttaataaactatcatgcattttaaaccctatctcatgatcaacccgcgcaaagctaccctttacagtttgaatcactgtttcacggagcatctaaaacatgggcagttccttgattctcatctaaaacaatgatctgaacttttctgggtcaattttctgctgaatagtgaagtcttttttgaatttctcttggattgtacactcaaagcgcccccctgtgttatgatagaaggaccagttcatatcaagaacactgaggctaagcgtttcggtgttttttatttttaggcagaaatctcttttatcttgatctccactctcagctctgcgctataaaacttgcttactttcagatccacaacctgactatcatctttgtatatcagatgattcaaggcaccttttacaccctttacatagttttcaatatcaggcttcgtttttccggttcgtctttgttagaaggctcggaatcgataatttctgaactgtctgcttcattaataactgctttttagaaagaatccccacttgctcaaaactgcttttcatacaggcttaagagccatcgcatcccagtcatttttccatccaacatcagacttactgaatttctttttgtgcttttctacttgtgcctttgtccagtacacagtttttcggaagccatttatcaattcaaaataagctgcataaccaattaccgcatctgattctcgtttttcaaaatcaatctcgatctcctcagtcagcggattccacttctgcaattcgctttcatgaatcggtatgaaattgatggacttatattggcctgttcgcaaggcaagctgtatgtaccctttgtagccaagctggaattgagcctttccttataaggaactatccaggcataccctaagtttttatgtataggcaggtcgagtgtagctgccacaggagcgcttttcatacatactaataataaaaataaaacctagttgaaactttacaagacaagctgaattgactatagtctaattagactaaaatattgatgtaaagaagtgaaaaattagatgataaagtcttttttaatgttggggcagtcgaatatggcgggccgtggatttttgaatgaagtagaccctatctataatgaaaaaataaaaatgctgcgcaatggacagtggcagatgatgacagagccgattaattacgaccgtccggtttccggcgttggcctggcggcatcttttgcagatgcttggtcgaaagctcatcccgatgaagaaattggcttgatcccgtgtgcggaaggcggcagttcattgaatgactggcatccggaaggcatcctttttcagcatgctttgtccgaagcccgcttcgccctccgatccagtcaaatttgtggaatcctttggcatcaaggtgagagtgacagttatcgttcgctgcatgaaacttattacgagaaattaactcttatcatcgggacgctaagaaacgagttggaattagttgaggtaccgttgattattggagggcttggtgactttcttgggaagactggttttggacagcacgcgactgaatttcgacaggttaatgaacaattgcttcgttttgctgatgaacaacagaattgttattttgttactgcagcaggtttgactgcgaatcctgatggcattcatttagacgcagcttcacaacgcaaattcggttaccgctatttcgaggctttttcgaaaaagcaccatatcctgaaacccatttcgggagaggagcaatcactgaaagtgaatggtgactattctaaaacagaacagatttaccttcatagtatggatttggcttcgggtaaaatcacgtacgcggaatttgaggcgcggatggcgaaggtgatgaaaccatgattcccttacttatccttggcttgctcatccaaaaccccggagctcacggctatgaacttctggccttaatggaaaaacgtcattacaagtacatcgttaacttcacgaaaggttcattttattacaatctgcagcaacttgaagaaaagtgtttgattgaacagattcagcagaaaccctcaaccagcgcgcgtgaaatccgtaactttaacgtcacagaatcgggaagggcagaattcgaaaaattaatgatcaaatacggcaccaaatcggaatatgtgaacctgcaattttatggggcgttactctttgccgatgaattcgacaaaaataaattagtgaatctgatccaatcacaaatcgatcagactaaaactcgaatcgagctccttgatgaatacctgtccatcactcaagaaattcccggcacaatcaattactttcgccgcatgaatgaaaattcccgttcacatcacttggttaatttagagtggttcgaaaaattgaaagcagaaatagagtgaactattgcataataaaaaatgcaatgttacatatatcagaatattagttacctgcatataaaacctgtgtcgcagatatcgagtaacaccattgatacaggttttataccccttcatttaattaaaccagtaatagggttgtcaacacttgccccaaacaagagcaagtgaatctgctgcgtgttcttctttttcaatccttcgtattaataaacgctttttacacctatttagtattcaagtaagtcaactgatttttctccaccttccgctaaactgctgctttagtcgaaataagaaaaagtgatcacccttaaggaagaatcacttcctctaattgaacaagcagtgaaggtgaacattgttctcgacataactaaaattttttatctacctctgcgtaagcaactttcaattgattgatagtaaacccctccaacaagaaaactccgtctttttctgttttcttttcaatataaaacaatgataacttctttcatcttatgaaacccaagcagttattaggtggttttctttatctgtacaaatacagttgaatcacttaatttattacatataagttatcctgcaaaactgtgcacgaaatgtcgggtagatacatttcgctcctgttattcttttgtgaaaggaggtcaaataaatggattcgcttaaaaggatgaacagcgcattaacgtatattgaagaaaacctcacgaacgatattgatttcaaagaagcagcaaggcttgctttctgctctgaatatcattttaaaaggatgttttccttccttacaggtatttcattatcggaatatattcgtcgacgacgtcttactcttgcagcttttgaacttaaagacagcagcgtaaaggtgattgatcttgcaataaaatacggttatcactcaccagattcttttgcacgagcatttcaaaatctgcatggcataagaccatcagaagctaaacataatggccattcacttaaagcttatccgcgaatgaccttccagttatcaatcaaaggaggaaatgaaatgaactatcgcattgaagaaaaagaggcatttcgcatcgtcggcattaaaaaaagagtccctattttgttcaaaggcgtgaatcctgacattgcatcgatgtgggaaagtttagatgaaacagcaatcaatcaactaaaagagctttctaatgcagcgcctgtaggactcatcagtgcatccacaaacttttctgaaggccggacagaggaaaacggagagcttgatcactatattggcgcagccacaacgagacattgcccagatcatctatcacagcttgaagtccctgcctcaacgtgggctgtattcgaagcagccggatcatttccggatgcactgcaggaagtatggggacggatttattccgaatggtttccatcgtcacattatgaacaaattgaaggcccagaaatcctgtggaatgagcataaagatgtaacatcgccatcttttaaaagtgaaatttggatacccatttcaaaaaagtaatatatcttacaatgaaattagaggaattgaaggttttaaggaaggggtctcatcccttcctctttaagttactaacccgatctgcagcattattgatgccactaatctacgaattgagttttttaatgagcagagccgttcttactgaaaatctaaattgaggtgtcctattgcgttttgatgatctgcttctcacctcttattttccgccttaacgtccgatcctttctgcaattgcttctgcaaagtcggacgttgatgattgaccgccaagatctcccattttgattcctgccttcacggtttcccgaagtgagttttctattaattccgctgcttctttcagctttttatcacgatactgtgtactgagccattcaaacaacatagcagttgaaagtataataccgataggattcgcaatattttcactgcaatgtcaggtgccgaaccgtgagcagcctgggccattgcctgctttcccatttgtattaattgacagtgcaagccccaagctgccgacgaactaaatgtaccgtcattgcatcgatatgataatcatccacttcagggtattgttcgccacttctcggcacgtattcaaaaagagtcccgagccatgtaaccttcttacggcgttccatcgcactttgaaaggctgcatgcgcaatacgtgtaatcgcctttttagtgaaaactccagtcaatacagccacttccggggttacctgccatacatatttcggccagcgtaaaagccttccgtattttcacggtaaatgaccaaattagctttccctgcaatacttttcattccaggtattgtctttgccggcggcaattgcttttcactcaatggtaaccagcttaaacgctggctggacaggtttcagggtgtatctattcattggagttccgtttcttgcaacttaaccaaaaacttcctcacgaagaacaaatcacttctctattgtgggatgctgccgaaaataaatcacttcacaacagagaaactgaaagcggtataaaaaaacagctccgttaaaatggagggaactgtctttgaattttggattttgcagttatccccatccgttagtttaattagaattcagataatccaagacacgatcaactctttcattgactgagtaatctccttcaatttttagcaatggacaagataaatctgccatccaatgttcgtgtaaagctttgcttctaacttccattccagcattatcatataaagaagcccactctaaaaatgtttttgattgttcatatttactgccgccggctaacacttcgtttccataacgctgaaattccctatgccttaatctctcaagccgtatatcttgcggaatccataagaagatgacaaggtcaaaataactttttagatcatcaccccagccgcacactgcgccagaaagaatccatttctcatttattgtcaagtctttttcaagcaactttcttctttcaggaatttctcttttcttagtgaatttgtctgtccaatagtaatcatcagtatcaagatgtgtatgaggcaaatgctttgataatgcaacacccaatgttgaagttccgactccggaggctcccagtatgtgaatattttttttcatagttccctctccttataaagcaacgaaactccctgtccgctgcacaaggttcttacaattttaacacaactacccaaaaacctttactctttgccaagggaatccagatgcgtgttaaaactttactgcttacgaacttcatggtcattttcaaacagaatgattaactttctctccggccttttttaatatcctcatacactttctcaaaagtctcgattggcagtgaaaacttggttgttttctcgttacgataattgatcatgatctcaatttgattatttttttgttcaaactcaataagtgcattctcccatttatctctgattgaaatgatacaatttccatttttcttttcctttttcttataaatgtaattcactttaactcccctttcattgatcgacaaaaggtttcggaataaggaagctcctcaaaaaaaggatcaaaacttttatcaagtttgattcttttccctttttagtcatttctttgcgaacgtttatagacattcatggttaccagccagctcaaaacaacgattcctgcaaaaagaatgagcatattactgtataagcggaatgatcagcgttaacaggcaagcagcctttgattcagcaagcggatcgataataaaccgcctgcaatcgaaatacccgtcccctcactgacaaaaagctcgtaaaattaagcagactcattccggcgccggcttccttttgtttcaaactgccagacacaattgtagatataaccgtttttgtgaaggagagccccccaaaaacaaaaacgatgataacggacatgagccatggtgtcgcatctataaaaaaggcagcgattaaaaagctggaaaacatcaatgcaatcccaatggtcagcacatataaagaacctttccgatcaacaagccatcctccaatgtaaccgaagatgatgacgctcatcgttccgggaaacataatcccgcttccaattgccgcagtacttaatggtgaacatctttcatcatataaggaaccatagacacaaatcctgcagcagtgccgaatatcaggcctccgcaaaggacgcccatcataaacaagacatttttccccagtgcagggtcaacaaaggattttgcacttcatccataactccccctgcattgattgatataccttattataaatcctcaagccgatgttttgaatactttgcgacacacacccgctaaatgacgaaacatcaaatactgttatatttaaaatttacagtaccaaaaaaccgcaatttcatttgctgttgaaaaattggaataaagcattgtatcgaccgctcctatgacaaagttatttttggcataaaaatgacaagctgaaacattaatatcttgtgtttcaagcataagaccgcataaatgattctcctttgcccactcaatcactttatgcaataaagccgtcccgacaccattttttctataatcttttgcaacggcaatgtcttcaatcagtgcgtatccattccaattagaacgaagcttactccggccgacacagtcgttctctgcgtaataaaaaaagacaactttatcctcttcttcaatataactgacatcaatgtcttcatcgtcatattttttgacataaggctcagcaaatttctcctctgtatatgtccaaacattgtcctcaaatgaagggatgattctccctgaaactacgaaaggttcgtttggtttattgaagtctttcatattgaatcgcgtcattttagttatcatcataatcacctttctgcatttattgaccttaatttacatctattgaactgttgattcgtctgcatgtcatggataccggtttaatcactctaagactaaaacaaaaaagataccaacatcgattggtatcatctattcattcgagcccttacaacaatatcctatttcggagcttccaaaccgaatttaatccattcctcttttgccggaccgtaaatacccggaacaggtaaacctgcttgtctcataaggacagtcatttgtcctcgatgatggttttgatgttgaattaaaaacatcaaaagtgaaccatttggcaattgctgaccaataaagttgacacattcttgaagtgtatcgtcagtccattgcgtttttaacgcctgtacaaatgcattactggcttgatgataactctcagcaataaaccgcgccgatgcaggaacaggataatcttcggccggagcgtgaaacgttaaatctgtgtttgaggtaatgatgtgaatggcagcgacagtatgccatgcaatacggcctaaagtccaatgttgtgaagtgatttcttgtttaagtgattcatcagtcagatgattcagcagtttctgtgtcgcatcggcttcgaactcccaagatttcaaaaaatggtctaaggtttgaaacataaaaatcctccttatccttttttgtttttctatgtatctacagttcaattatagtgctccgcttagttaaaaaagaacaaaacgatagacagacatttttaacagaaagcccgatctgacaacaacagacaaaatataagaacataacggataactctatctttctttttcttcaatcgacaaaaaaaggatagctgttcaaacaggattcttctgtctaatattttctctttgcaaaagtccatatcgccttagtgattgaaccggagacaaaacagctccccgtcatcatagccacccaaatgaaaaatgtcggttcggcacctattacaataaacatgaatatcaaggacaaaatgaagacaataacaaccatcatccatacttttttaaagatgaaataccctaatatccctaacagaaaagaagctgccggaagaaaaatgagaatgatatacgcgggactcaacagcgggctaatacaaacacctcccaatttatttaaaaacgaggaagttcctactttttgtctgatatgaagtgatttttttcatcttgatattatgccgttttattcattttatacatattataccaatataatcgagtcaaatatagatatttattcatttttaacatattttagaaaaatcagaagtgaattaaagtctgaggatagcccgctttttctatccctagtaagccctgccgcattgattttagcccatcattgtttttgcagcgctaatattctcaaaatcgtgtgcatgacgctgctttcctcatttgatttgatgacaaagtgcgccgcatcttttatttcgtcaatggcgttcttaaccgcaaagctgtaggatgctgcttccatcaattctttgtcattgcggccgtctccgaacgccattgtttcatcagccgaaacccctaataattgctgcagttcttgtactgttgttcctttatgtattccgatatttgatatgtccatccaggtatcctctgatgctacgatatataattggtgaaaaaattcatgcagcttttctctcgtttccggacagttggcgtcggggtcatgaaccgtaatcttgataaaatcgtcttttatctcagtaaaatcagttattttcgttacatgtgcataagaggcatttacatatttcatttcactttcagacagattttcttttacgatcgcgccattttttgtgcatgcgataatgctatgcccgcagctgattttttctaaagcgcctataattgacagtcccgcttcattgctgatcaaagattcatatacgaacttgccgttcttttttatacgtgtggcactgtctcctaaaatccaaaaatcgttcgcatcttctccgaataaggcttccaccctttcacactgcttcccggtgcagatggcgaaagcgacatgctgttcctccattactcgttttgtcttttcaaataacgttctgtcaaaatcgccttgattatttaaaaatgtaccgtctaaatccgtaatcaccaatttaatcatcgttcagcacctccgcagttaaaacgtctttttcagacaaagggtttttcacatttgaggatggaatcaatcgcatttaagaccccttcttcattgtttgattgcgtgatatgcgcggcagcctgtttaatgctttcctgcgcattatccatggcgaccccgtatttcacggcggacaccatctccagatcattgccgctatctccgaaggccgcacactcttcatcgcccatcccccattgtttctggagaagcttaatcccgcttgctttatgaagccccggtatgatcagatctatgtcaccgtgcccgcttgatacaggcgtgacgaaagacccgatggcgttttttaaacggctcagaagtgcggaacaatgttcggcgggaaagctgatggaaaattttaaaatgtcatcatcgatgttttcaaaatgcggcaccctttttaacacataataatacttactggcatgcagatattcatcttcaccggcattttcatgaatatacgcgcttttttttccgcagacaatgacgttaatcacctcatactgctttaaagcacggatcactgcttttatagtgtcttcagacatcctgcccgcgaataattcttctccggcattcacgacgaaagcgccattctcggcaacgaaagcgatttcacttttgatttccggaaagaaggatgtaagctgcgcatactggtttccgcttgctacggcaaatttaattccccgcgattttaattcacgatactgattcataaaacgctctttgttatatgccatttcatcattcaaaaacgttccgtccatatcaaccgctatcagtttgatactcatattgtcctccttttttcggccgcttttgtcagagacccttgaagagatcatgcataaagcgtatgaacgaattatatccgcagttgttttgcgccgtaaatcattggctgacgtcttgttttgaatgacacaaaaagtgatttgtcacataaatataacactatgtttcttttaaaaatgatatgttacgattagatgtacattcaccattctcataaaaaggagaatccccctgcatgttcacacacgaaatgattgcttcatttaacgagcttgaaacttctttatacaactacgtctcccaaaacagcgagaaagtcgtctatatgcgaatccgtgaattggcaaatgaaacccatgtatctacggcttctattttacgtttctgcaaaaaaataaactgtgaagggttttcggagtttaaggtgaagctgaaaatgtatacggaggcaaataaaaaaacgattttaaagagtccccatcattccgttgccgagttttttgaaagaacagtaagcggagggatagaagaaaagctgaaggaagcagcagcccttgcggccgatgcagaaagcgttatttttatcggagtgggaagttcaggaattctcgccgaatacggagccagatatttttcgtgcttagggaaactttcaatgtatattaaagatccttactttccggcccattcccatttccgtcataacagcatcacgatcgcattatcggtttcaggtgaaggagattctacggtgactcatctgaatcagctgaaacaagaaggcagccgggtcatcagtattacaaatcataaacattcaaccattgccaaaatggccgatgtgaatatttcatattacgtgacggaagaatgggttgaaaatgcgaatatcaccacccaaatccccgctatgtacatacttgaatcaatggctcgggagatatacaaattgagagaataaattcaggaacgaaccactgatacgctggaaatttcggtatttttgcaaaagtgatgagaaacccttctctgatgccagagaagggttttgaagatcacagatgagacacaatacaatttgcatggcctgccagtttatattctcccaaaccggaaggcaggagaatatgatctccttttctaaagggatattcatgcccgcctgcaatcattattccgtctccttcgatcacgctgacaagaaggaagggatgatgctggaatagatttgcttcaccgtttacatcccacttttcgactgaaaaataaggacattctattaaaacagctgccagcagattatctgtttgtttatattgaacggtcggccgttcacggacagatggaacgtctatcacttctatacttttttccaaatggagctcgcgcagcctgccgtccgcatcttttcttccgtaatcatacaatctgtaagtcgtatctgaattttgctgcgtctctaaaataagtgtgccctttccaatcgcgtgaacggtgccgcttgggacaaaaaagaaatctcccggctttaccttaactctgttcaggagcccgtcccattctccgcgctcaatcatggatatcatttcttcttttgttgttgcgttgtggccgaaaatgatctccgcatctttttcacaatcaatgatataccagcattcggtttttccaagttccccgttttcatgcattttggcaaagtcatcattcggatgcacctgaacggacaggtcttggtccgcatccaaaatttttgtaagaagaggaaaacggtctccttcaaggtttccgaataaatctctgtgatgctcccacaatttaccgagcgtacatcctttatacatgccgtttcgaactatgctctgtccattttgatgagcggcgaaggcccagcactcccctgtccgctcggacggaatattatagtgaaaatcacgcagggcggcgcctccccaaatcctttctttgaaaaccggattgaaaaatatcggttcagtagacatgatcatcccccgctttattcgatttcttccagaagctcatacgcctcttcttttgtctgaacggagagcagcctttcccgatagctgtcatccatcagttttcgggataacatctgcaatattttcagatgctgatttccgccgctttccttcggtacggcaatcataaaaatcagttttgcatcagaaccatcaaggctgttccagtcaacacccgaacgccttattccgaatgcgacacccggcgttttgacggtttcagactttccgtgcggaatggcgatattcatacctatcgccgtggttccctgctgttcccggctcaaaatggcctgcttaaatccgctgtcagacagcagcatacctttacgggacattttctcgatcatttcatcgataatgtcatccctcgtttcgccggataaatgcggttcaatcaagtccgtactgataatgtcagtcagttttttgatttcggtcatcccggcttttcggctgtcagcctgagatggttcctttgtttcttttgccgctgcagcctcatttgggacggcagacggcagcacctcgccgggcgcggaggatttcgccatatctttcttcagtacattaaccaacagagcagtgacaagagagcctgctgttacagcgataaaaaacatcagtacatgatctactgctccaagtacagcaacgatggggccgccatgtgccactctgtcccccacatggccgatcatcgctatcaccgatccggtcatagaacccgccataatactcgggatcacacgaagagggtcttgggccgcaaatggaatggctccttccgtgataccgaaaaggcccatcgtaaatgatgcttttcccatttctctttctgcggcggcgaattttctttttcctaaaaacgttgcaatcccaagccctatcggcggtatacaaatggaaacggcaatcgggcccataatttcataatttccttctccgatcattgccgatccgaaaagaaaggccaccttgtttacgggtcctcccatatcaaaggagatcatcgctcctaaaatcaatgccaggagaattgagctcgaacctttcattccggcaagccaaaccgttaatgatgcgaaaatatgagcgacgggggcgccgatcagaaagacaaacgccaaaccgacgatcagtgaggcaaacaccggaataataataatcggcataatcggctgaattgctttaggaactttacattttttgattccaagcgccgcatatcccgccaaaaatcccgcaatgattcctccaagaaatcctgcgccgcttgcactgtcgtaaaagctgccggctgccgcaatatatccgccgatcattccggggacaagacccggcttatcagcgatgctgaacgcgatgtacccggctaaaatcgggatcatgaatgaaaaagaagcactgccgatctgttcaatcgttttccaaaaagactcgtccggaatgactaacccctttggtgttttttctcctccaagcgtcaatgcaaccgctatcaataatccgccgacgacaatgaaaggaaccataaaagaaacgccgttcattaaatgacggtaaatcgggttttgttttttgccctgctgacttgcggattcagcttttgaagcagattgatagaccggcacttcaccgctaagcgctttttgaattaattcttccggtttgcggatgccttcctgaaccccgacagccagcagcttttttcccgcgaatcggtctttgttcaccgagcggtccgccgcgataatgattgcgtctgcttcccggatttcctcttcggtcagcctattttccaccccgattccgccctgggtttccactttgatctcaacgcctaatctgccggctgctttttgtaaattttcagcagccatatacgtatgggcaatgccgttcggacatgatgtaatcgctaacagtttcatataaatcctcctttgcagtctgaatttcaagatcttgtctcaactttatactgaaatcagcctgtgataagcgcgtttttttaccataagttccggaaataacggcatttttccctataaacagaaaaaaagcagggagatattccctgcttttaatagtttaaatacgataaaaacgtcatcacatttttttcttccgtcagtttttgaataaatgccggctgctcgctaagataggaaagctcactgaataattgctttaccttgttttgatcttcgtgtttgacggcaagcataaaaacgagcgacaccttttctgtcccccactcaatcggctcttttatggtggcgattgcaatggctgattgtttgatatatttagagttcgcgtgagggatggcaatacccgccccgatatttgtcgccgacattttttctctcattactgcatgaatgccatactctttttctacatagcctttttcatacaaagcctgcgccagcttttcaatgacctgataacggtgctctgtctcttgctgtaaaaaaacgagaaacggagtcgtatcgttcagcattttaaacgttttttgctcccggcggtgtgatgtatcaagctgttgcagaaatgcgctgagcttcttttcatcagcagactccaaaagcggtgatacgacaatatgagggatcgttacatttccaagccctatcgtagaaatgacgaaatctatatctttatgctttttgatatactctgtcagctccgcttttgcgatacagtcttttaccgtaatgtgatgaaatttgcgttcaattttagtccgcagcaattgcgacatgccaatgcccatatggcagacgatgatcgtccttttagggttatgactgcttcggcgcagccgttcgatcgctgcctgaaaatgcagcgtcaaataggccgcctcttcttcaggaatataaagatcaaatgtttgattgatgtcttctaaaacgtcaatgataagatgaaacaaataagggtacatttttttgatgtcgtgaagcatggggtttgaaacagagagatcataactcagccgcttcaacaccggatcgagatgaatgttcaatccgttgatcagttcccggtctttatgaaaatccagcatttgcagttctgaaacacgattgatcaaatgcctgacgactttggaaagctcagaatcttcaagatcaagcttcttttcttgctgcgatggataacggactttcccgcctattatatgtaaagttaaatagacggcttcttcctcaggaaaccggatggcaaataccggctcaagccgttttaaacaagccagtgtccattcatattctttcttcttttttaccgcgtccagctgtcttgcagaaatggcgaccggctgtttcattttgatacggcggatagtcagcaatgtatgcagcagcaaactttcaaatgtttcatccgtaaaatagatagaatggtttttttgtaataacttgatttcttttctcacaaagtccgcttcataacttaaaaacttactttttataaattggcttgtaaattccgcattatcaatcaaatctgaaattcgcgccaatgcttttcttttgtttttttcgtccccttcaatctttaagccgagccgctgtttagaaaccagcgtgagatcaaatcgcttcagccactcttcaaccgcacttacatcctttttaatggaagctctgtttacaaaatgctgagcggcaatttcttttgcggaaatgggctttgaattcattaataaatcataagcgatgtgaagtattctttcttcatcggtcttgtgcctgcacgtaaagtgctcattataaatttgccggcttaaccgtgacctttcctgttccgatatatgtaaatagacgcctaatcccggtttgcggatcagctgagcttgagcatgttcattcaggaaatcttcaatcgttttcaaatcattcctgatcgttttttcagaacagcggaccctgtctgcgaaatcttgcacaactaagtagtcatcaggttcagataacaacagatacaaaatctttttctgccttgaattcatgtatttcatctgtttttctatccttcctgtccgtttctgctggagcaattgtgataggttaaatatactgcgcatacgaaaccgttttcattttatagtgaaacaaaagagtaaaaagttttgttttttaccgcaggttccggaaaaatcatgttttatacagagacaattcacctttgattgacgtcaaaacaccaaccgtttttaaacgattggtgtcggcagcgaaaacctgctgttacagccaaaatgtttcgccaagcgctaacgctttcaggttttcaggaggtaatgcaagccgatcccactcgccgtgcagtctgcttaatgcttccgggcctgtatcatcagcaagccggaatgccccgtaatgcatgggaatgaagctgtcagccttcagctccaaaaacgctttcacggcgtcttccggattgatatgtgacacttgcataaaccattccggttcgtatgctccgatcggcatcagagccgccttaatacgaaacctctctccgatttctttaaagccttcaaaatagcctgtatctcctgcaaaatagatggactcgccgtttttgctttctatgacccagcctccccaatgagaggtatcggtatcccaaagcgttctccgtgtccagtgctgggccggaacaaatgatatgttcaccccccgcatctcaaaacgatcccaccaattcatttcatggacctttttgcggccttttttgttgaacagctttttcagtcccgcaggcacgtaaaaatccgggtttcctctcagtttatttatactcggaaaatcaagatggtcataatgcccgtgtgagatgagcacggcatcaatgtcaggcagttcgctcaattcatatcccggctctgtcagccgtttttgaaaacccatcctccgcgcccatacagggtcggtcattatgttaagcccctgtatttggatcagaaatgaagaatggccgatccatgttatggcggtttccgtccgattgacggcaacatcacggacatcccttgtgaccgctttcggaatattctcgcttaaatctttacttttttctcttcgttctttcatccatttccacatgtccctgaatccatgttcattcttcacgccattcaagttttcatatctttttttcattatcattctcccttgacacgtgttccattagattcatcggacatttatacaatgtctgtaaataccgccccgcttgctttggccaaatcttgaggcgctgctttcagctgcattccgattttccccgcactgacaatcataaactccagtgtttcagcggatctatcaataaaagtcggaaacctttttttcatgccgatcggagagcagccgccgcgcatatagccggttactcccaaaaggtccttcatggcaatcatttctattttcttttcacctgccgccttcgcagcttttttcagattcagttcttttgcaacgggaacgacaaagacgtaataacgatcagttcctgcagatgccactaaggttttataaacatattcggcagcgtatccgattttttgtgaaacggaaagaccgtctgcgggctgtcccccttctgttttgtaacctaatagctcatagggaatgttttgctgctcaatgatacggacagcatttgttttcactgtttttttcgccatggttttcctccgttttctgtatttctttctgctttattttcaacttcgattttaataaaatgaccgctcagttgcgtgctttgtaatactcaagtgcaaactgtttaaaacgctcagcagcgggagagagagcatggtttttcagctgggctaacgctatggtgcgttcgcattggtaatctgcaaccggaagaaaaacgaccggaaagtatgaatgctccgcggttttcggcagcactgcagcccccagacccgcggcggtcagtcctaatatggttgacacttcctctccttcaaatgcgagatgcgggtgtatattcaaatcccggcacatcagatcaaacatatacctcagcccgtatcccggtttaaaacccacaaaatcctcgtcctgcatctctttcatttgaatgcttttatttcctgcaagcgggtggttctcaggtagcaccgcataaagaggctctttctccagcactgtccattgtaaaagctcgctgggaagcggcggagagctgagacagatatccgcatctcccgtttccaccattttgcgaagcgtttcatttgcgccttgataaagccggaaggtcacgtttgggtatagctttttaaattcggcaatcagctgaggcattaagcgcagcccgagtgtatgaagaaatgatacagatatttcgccgtgctccaggctcatattctttttcacttgttcaacgccttcatttaaagctcttctcgcttgttttgcttttattaagaactgctctccgtgtcttgtcagccggacggcttttgtctctctgtaaaataacggcgcgcctaattcttcttcgagcctgataatcgatcggcttaatgccggctgagaaatcattctttcttttgccgcatttgtgaaatgctgatgagctgccgcagcaatgaagttgtcaatttgatgaagctccattttctccttctcccctttcttcataacctacacgcattaattctatagttattataaattagacacattgaaatgaaaagcgtacgatacatatataaccaacagtgagaaaagagggacattcatgacgtttattcagcctcatacaaaggcttacagaaaggccagcttggctctgtttatcagcggctttgtgaccttcgccacgctttacacgacacagccgcttatgcctttgttttcggaagagtttcatatttccgctgcggctgccagcttaactttatccatctcaacagccgttttggcattttcattattggccgccgcttcgttgtctgacggattcggcagaaaaaaattaatggtgctgtcgttaacagctacttctgttttaggtctattaacagcgttcagtccggcttttcccacgcttttggcaatgagggcgctgctcggtattttcctggcaggagttccggctgtcgctatgacatatgtaggcgaggagtttgatccgaagggcctcgggaaaatgatgggcttgtatatcagcggcacaagcatcgggggaatgagcggcaggctgttaacggggcttctgaccgatgtattcggctggcggccggcgcttgccatcatcggcattctttctattgtattaagctatttgttttggcgttttcttccggctccgcgccattcatctcagcggcatgcgggcgtaaaagcggcatgtaaggaatacggagcggtcctgcaccgcaaacggctgcttttgttaatatctctgggatttatattaatggggagttttgtgacattatataattatatcggctttcatttaatggcggctccttatcatttgtcgcagactgtgatcggttttatttttattgtctatctcgcgggaacgttcagctcggtctatatggggaaaaaagcagatcttttcggaagcggaaaaatgattaagattgcgatttttgttatgcttgccggcgcagcggtgacacttttgccccagcttgcgctcaaaatcgcggggattgccgtctttaccttcggctttttcggcgctcattcgatcgcaagcgcctgggtcggccgcgcagccggtgatcatcgtgcgcaagcctcttcattatatctgcttgcatactatatcggttcaagcgtggccgggtcttgcggcggtttcttttggacgcattttcattggatcggtatcatttcatttatttcggttttgctattgctgtcttatccggttttatttctggcggaattcagaaaaaagggacatagccgcctgcatgtaaatcaataaaaacattaaagatttgtgccttttgtccgatactaaagataaggccggcacgatactccctataactattccttttgattcagtagatttcaaatatcgtgccggctttcttcaattaaaaaacattcttcagttgtctcactcttctgttacatacctgcccaaacatctttcgcatatcttccttccgcctgcagctgttcaagccactccaaggaaacttttgaatcggtgttatgcaccttttcatacgcctgaagcagtacattttcgacagccggagccattttgcttccgtcaccgcatatatagagatggccgccttggtcaagaagggcaataatttgtgcagcctcgcgaagcagaacatcctgtacatatactttacagtcctgatctaacctggaatacgcccgatgcacggtgacaaggccgtttttctccgcatggtcgaattcatctttgtacagatcgtcttcttcgggatgcctgcagccgaagtataaatgagcttcgcccaggctgttaccggacattttttcggcagcccgcgcctggataaatcccctgaacggcgcaattcctgtgcctgctccgaccataataagaggcgttttcggattttcaggcaatgcgaaacccgactgcggcgagcggatgaaacagacggcagaatcgcctttttgtaatccggctaaatagttcgaagccacgccccggtattccccacggccgctccatgccggagccgtcacaacgccgaccgtgatactgagctccccgctggctgccttcggtgagcttgagattgaataatagcgcgcctttaaggacggcagaagttctaaaaagcgctcaaacggcagttcacatgcaggataatcttccagcaggtccagcatggtcattcgttttttcagcacgttttctttatatgccgcatcatcagaataaagatgctccaattctttttggtgcggcgggcacacggtatgtgcggcaagttcgcgaagctgggctctcgttgccggctcctgcagctctacataggacgccaaaagctccggcgcattaaccggccggtccatcggcagatgaggcagctgccggcccttgatcttaaagtgctggttcggatcaagaccgaatcggcgaatgacacggctgatcagttccccgctgttttgcggaagcaccccgagatgatctccttcctgatacgtttctgtttcggggagacgcagctcaatatgccggactgagcgcttgctgctttcggtatgaagctctttgttcgtaatgacctccgccgcaaatgctttgtacgttttggcaatcggcgtctcggctgcttcacttacgtattcgattgataactgtgatttgtttgtctgttttggagcggcctctatatgaaaagccttcatgatgtccttccagaatgagtcttcccagacttcctgactgtactcaaaatcatcggcattgtcgccctccccgatagaggtcagccgttttgcccctttttcttcaagcactttgtctatcaggcgggggatcctttggtaagtggcggcccagttgcggtctccgcagccgaagacggcgtaagaaacaccctttaattcctgatcttcaagggtttccatccatttcacaaaacccgccgcattatcaggcggcgccccgttataagaagccgtaacaataacgaccgcgccttttacaggcagtttcccggcataatcatcgagcgggccggtttcagttgaaaatcctttgcttcttccgatatcagccagctcttccgcgattccttccgcagtccctaaatttgatccgtaaagaatgagaagcggcgttccgtgggacgggatttctttcgtttcttctttgtgaccgcttccttcagctttttggctttgtacgggctgatgattggacacgtccttgtttttcacacggattttaaaatcaccgggcttaatggttagagcttctttaatcgtaagctcataatcattatgatcaatcagttcaaagtatttcaggacaaggccgagcaccattgtcgcttcctgcagggcaaactgcatcccgatgcatgcgcgctgtccgtttccgaacggcttatatgcatcagccggaattgccgcgggatcactgaacctttccgggcggaatgactcggcatcttctccccacgcgcttttatcccggtgcagctgcggagtcagaatcgtcaccggctgtcccttcgcaatcggatatttcccgccgagaaccgtatcttccttcgcgtacagagaaaatgccggggcagtcggatacagccgcaaagtctcgtttagcaccatgcggatatatgtcagctgctgaatctgcttatattcaggggtctctcccgtcagcacccgctcggcttcctgaacggcttttttcaatttatctttatttttcagcaggcagtatatcgcaaaagaaagcagcccgcttgtggtttcatgcccagcgatcaaaaaggtaatgatttgataacggatattttcatcatccagcctttcccccgttacagggtctttcgcttcaagcatcaatgctaaaaggtcagacagattctcatccggattttccctccgctcagcgatgatccggtctacaagcgaattcatctcttcaatatcctgctggaactgatgtctcgttttgatcatcagcttgtcctgcaggctgtgtctctgcgattggcgcattgcctcctgcagcgcacgaagcatacttgtgataaaaggatgctgtgtgtcgcggtaaaagctgttaaagcggtaatgaaatccgcacaggccgattgtatccagcgtcaggcgcgtcatatcttcggcaacgtcaatttcttcattcggatttaatctgctccacttctgcacgagctgcatggcaatatccagcatcattgaatgatagcctttcatcgccttctggctgaagctcggcaataaaatccgatgcgctttctgccagttcttttcgtgagtccagctcgtaaatagtccgtcaccgccaaactcacggaccttcagcaaagctttgctgagatttttgtcaaatcgcttttcatcacagacttctgccgcgagctcgcggcctgagacgaagaccccgacagagctcggaaattcaaaacgaaagatcgggccgtattcttcggcaattttccatagcgattgtgacagtttttctttttccaagtgagggagatttttcagaggcccgtatgttttcggctgcggtatagcgcttagctgtttcatatcgatcttccttccttcggcgaataattaatgagttctgatggcatcccaagaacattgctccaattctttcaaaaacggttttgttatttcgacgcttcccgtccggacaagctgatagagtttgagatatgccccgagcagcagcgccatcagcacattggacggcagattgcggagcacgccttcagacttgccgcgctgaaaaaagacgtcaagcatctgtgttatttcatcaagaagcttacggctcgtttcattcagaaagtaggcgtccttattcgtttcaagaaaaaacaatgcatactcactttccttcgtaaaatcaatcagacaataaaacaggtgatgaaacccttctcttacagatatcccctgaaagtccgttttgacttttttcataaaacgctgcgcactttcctgatacagtacgttcacaagtgtctctttactgtcaaagtaacggtaaattgtgccggttccgacatcggcctgagcggcaatcatcggaatcgtcgtggcgtcaaatcctctatctgtaaacaaagtaagcgacgctttcataatgagttcaaccttgtttgaagctgtcatttcatccccctttctaaatgcggaatgaatattcattccgtttgttcaaaatatttaaaatgtacggtcatctgattaccattgtataagaaaaaaactttttttaatataaaatatatgtgaaataaccaaaaataaggaaatatgcccaattccacaaaaagagctgcagtgacttaagcagctctttttatttcccaagaaatattctatttaatggcagtaataaaatggaatgaatctctgctgacaactgaaatgtctctgaaatgctgatcatagagcacctcaatcacatccttttcactcatccgcgaaggtttcaaaaccatatagaaacacccgtcaatttgaagaacgcggtacacttctttacatgccgtccggtaatcgctgactgtttcagcagtatgtaatgagaaaactttatgaaaactgcggtcgcggaagggtatgctttccggcctcccctgctgaatgtttccgagcccggcttttataaccgaacggtttgcgcgctgtgttttccgtattttacgtttcgatgtttctatgcttttaagactgcccttttcaagctgtccgatgatttgtttaaacattgagccgtttccggtcccgatttccaaaatgcggtcgtattcctgtatgtccatcaagatttgctgaatgactgactctgccggttctgatgcagcaaagtatttcgcgcgcattcgttttaatgctgaagatgtatgttgcaacattgtataacacccgcttttccattcctgtgatttattattcagaaataatattacctcgtattagtatgaggtactaactagacgcacttctcttcatgaacgtttcgatttatttgaaatttatatttgttttcataaaaaaaagacggaaaacgtaggttttccgcctgctctagtaccaataatacggtgctatatatcttgtctgccgggaaagcgccgccattctctgccggcgatacgggttgccgtagccgtgcttaaatgaatggggcattgacgcatacccgtgcccgatggatggaattctgttctgaccgccttgcatgctatcacccgcttaccaatttttctttctttaccatggtatgcaggccgtctgcgacgtgacagcaacatcctcgctaaacctggtccttctccattgtgtaatgattcagcagttcaattctgaacatgataatctcctccttctcctccgttttggcccttcgtgtccgttagttcatataaaagtgtttcagctggcgttctttcgcttcattataaaactcttcgacctgctgttctcgttcatactcttccgcacttttaaaacgctttgaaatggtcagtgttaaaaagaaaagattaatggtcattatcgctcaccccctttcaatatccgcacaagcgaaaataacccgcagcaaagttcatatgcgctgcgggcagactaaatccgcagacaaaagaagacgtgcttctttccctgcggggagctgcgaatgtcctgatactccgaaattaacgtgcttgacgggcagaggttaaggaaggacacgaactcttccacaggctgaatcggttcaattgtagattttgattgccgtttaacgtcgtcatgtgattcaacctccctttgcttttttcttactttgtaagtatatccatcagcttccattttgtaaacatttttttcaagatttggacggaaaatgtgctggcattccgcttcaattgtccgtgttttccggcatctttcttacctcaggaaactcttttcatcccttgctttttctgatctttttttgaatatgcaataaaataaatgaggccgacaaacactgccccgccgatgacattcccgataaaggccggaatgagattgccaatcagatcaccccacgaaaatgaacctgcaaaaatcgcagccgggatgataaacatattggctacaacgtgctgaaaaccaattgcgacaaacgccataatcggaaaccatatacccgcgatttttccggctccgtcttctgcgccgaaagaaagccagacggccaaacagacaagccagttacagccgatcgccgaaacaatgacttttccaaacggcatatccaatttgccttgtgcgaccgcaattgttttttccaagtaaggtcctgtttcggttaatccgacaacatgtccgaaaaagtaagcgacaaacagtgcgccgacaagattcatcaacgtcacgatcacccaatttttcaccaatgcaccggcggatattcttctggaaaacagcgccatggataccgacatcatatttcccgtaatcagctccgctccggcaagaacgacgagcaccaatccgatgggaaacacggacgccccgattaaactcgacaggcttccccattctttcggaaggtcgccgatgacacggatatcaagcaaataaccgagtgcgataaacgctcctcccaaaaatcctaatacaatcagtgctgaaagcggtgaatgcaccttttttacccctgattcgaccgcaagctccgctatttcgtccggtttacgaaaagccataataacccctccatttatcatttcagcccgcagtttccaaagacgcctaacaaaaaaggcagcattcaactaacccgtctgaaaaaacggggtttgaatgctgcctaacttgtatgcatacccatacaacaatatcaagcagaatgaaaatatgcggtatagaatatgtacagatcatgcacacattccataaaaaatcgtccttaggccactgctggcagttcatatcatatcaaatgtgacaatttcgtgtcaattgaatattgtcagcttttgatttcttctttatgctcttcaattgagcggtcaaagacaaacaccgatacagcaatattttcctctattttaatatctgaaaacagatgtacaagctttgctccgatgagctcttccattccgtcaggcgtttgttttgaatacagctcctgaattaagctggttcgcgccgcatgaaccatttctcttccttcaggcgtgcgtgcgataaactgctcacttgcgcttagatttccgtaaagcgtagataccgccatgttatccacaaaaacggtgtgaattcgttcaggcccctttccaaataattctttgcgcaatttccggataatatcgttaaattcatgaatttttttagacatattgacccctccgattttagcctatgaaagacattcccggttcccctttgtgacatttcacttggttaaagttttcctttcgtattgtattataataaatatcaccttataataaaagcagtgaagatggatttgtaataggaaacgtgttatgagtctatcgttttatacaaataggattggtctgttagtaagacttgctagtgaactattccgccatgcgtatttataccgttctccggacaggaggccggtatctatgtgcatggcttttttcgagtttaaaagatggaggggaattggaagtgacagacgttcagtctatccgtgtcaaaattgacggcacggagtatgaagcaccagaggggtctaagattttagatattttaaaccaaaacggaattgagattccgcaaatatgccatgtaccggaagtggatccgattcaaacatgtgacacctgtattgttgaagtaaacgggaaattgcagcgctcttgttccacggctgcagaaaacgggatgtccatctcgcttacgtcgggaagggtaaaagaggctcagacagaggccatggaccgcctgctcgagaatcacctgctttactgtacggtatgcgataacaacaacggcaactgcacactgcataatacagcggaaatgatgggaattgagcatcagaaatatccgtatacgccgaaagatgattcaaagtgcgcggttgatatgtctcacccgttttaccgctatgatccgaaccaatgcatcgcctgcggccaatgtgtggaagtgtgtcaaaaccttcaggtgaatgagaccctttcaattgattgggagcgcgaccgcccgcgggtcatttgggatgaaggcgtcgccattaatgaatcttcctgcgtcagctgcggccagtgtgtcactgtctgtccttgtaacgcactgatggaaaaatcaatgctcggccaagccggatttatgacaggaataaaagaagatgtcatggaaccgatgattgatttagtgaaaaatgttgaacccgactatacaagcatcttcgccgtgtctgaagtggaagcggctatgcgcgataaacggacgaaaaaaacaaaaacagtctgcacgttctgcggcgtcggatgctcttttgaagtatggacaaaaggccgtgacatccttaaaattcagcctgtttccgatgctccggttaatgcgatttccacttgtgtgaaagggaaattcggctgggacttcgtgaattcggaagaacggattacaaaaccgcttatccggaaaaacggcgcatttgttgaatcgtcatgggaagaagctcttgatcttgtcgcttcaagactcggttcgatcaagaccgaacatggaaatggttctgtcggttttatttcttcttctaaaattacgaatgaagacaactacgtcattcaaaaattggcacgccaagtatttgaaaccaacaacgtggataactgctcacgctactgccagtcaccggcaacggacggcttattccgcaccgtcggtatgggcggagacgctggcacaattaaagatatcgcaaaagcgggcctcgtgctcatcgtcggcgccaatccggcggaaggacatccggttctggccacacgcgtgaaacgcgcccataaactgcacggccaaaaactgattgttgccgatctgcgcagaaatgaaatggctgaacggtccgacctctttatcagcccaaaacaagggactgaccaggtctggctcatggcagtaacgaaatatatgattgaccaaggctggcacgatcaagcgtttattgatgaaaatgtcaactactttgatgattataaagaaacgctggaaaaatacacattggaatatgcggagcgcatcaccggactttctcaggatacgatcatccgcattgccgaaatgattcgtgatgcagacggcacttgtgttctttggggcatgggcgttacccagaatacaggcggctctgatacatcagcggcgatttccaacctgctgcttgccacaggaaactaccgccgtccgggcgccggagcctatccgctgcggggacataacaacgttcaaggcgcttgcgatatgggaactcttccaggctggcttccggggtatcagcatattaccgatgatgcggcacgcgctaaattcgaaaaagcttacggtgttgaaattgacggcaagccgggtcttgataatatcgaaatgctccatgcgattgaagaaggaaacatgaaagccatgtatctcgtcggtgaagatatggcgctcgtcgattcaaacgccaaccatgttcataacattttatccagccttgatttctttgttgtgcaggatattttcctttcaagaacggcgcaatacgcggatgtcatcctgcctgcggttccatctcttgaaaaagacggaacatttacaaacacagagcggcgtgtgcaaagattgtatcaggcgcttccgacactcggcgatgcaaaacccgactggtggattattcaggaagtcgccaatcgtttaggcgctgattggaattacacgcatcctagcgacattttctcagaaatggcgagcctttctccgctgttcggaaaagcaagctacgacgttcttagcggctggaacagcttcttgtggggaagctttacgggagaaagcactccgcttctttatgaagacggctttaacttcccggacaaaaaagcccgttttgcgctgagcgattgggtggagcctgctgtattccctgaagaatatgacctgcatattaacaacggacggatgcttgaacatttccacgaaggaaacatgacaaacaagtcaaaaggcattcagtctaaagttccggatgtatttgttgaagtatcgccggagctcgcggctgaacgcggaatttgcgacgggacaatgatccggctcgtctctccttttggggcggttaaattgaacgcgcttgtgacagaccgagtccgcgcaaatgagctttatctgccgatgaactctacagataaagattctgcgattaatttcctgaccgggcctgcgtatgattcacggacacatacacctgcctataagcagacaaaagtccgcatggaagtgcttggttcctgtgatactccgccgcttccgaaaacgaatccgcggaacaaaaaacgtcatccgcaaaacggtgtggaagctcagcgaaaatggaaccgtccgggctatgtgcacttaactgattaaggaaaggaggaaacattatggcaagcccaattactgaaattcaaaaagaaacgaaaacagaggaacagctgaaagctgaaaaactggaagaactgaagacgcttctcgcagaaaatgaagaagccgtcgcgaaaacgatgtccatcatggcagagctgaatggcttgggcatttttgatgccgccggctatatgctccaggcaaaagaggagattgccaaaatcgcactcggacagatttcccgggaacctgtcaccaatctcctgaatacgatgatggccgcgggaggcgcgctgtcaaaagctgatcccgaatttatgggcagacttttagaaagcgccatggccgggacggatcaggcgcaaagatttttaaaagaggacaggaaagtcagtatgtttgaactgatgaaagccgtcggtgatcctgatattaaccgcgcgctcggcttcgggctgcagtttttaaaaggaatgggaaaagaattacgcgaaaccccgtctgaataagaaacgaaaaagccattgtcaaaagacaatggcttttttttattcttcggcctcttccagcctctttttataaataagtgaacggtcaacgcagaaataagcgcccgctaaaaatacacaatccgttacaaacatcagcattttctggcccgcagtcagcccttgtccgggaagaaccgcgccgatataaatgaaggtgctgactgcaagcagaataaatgcgtaatgcttaaaatcttctattaatgatttcagtcttttcttctccatataaggtcacctgccagttttatagtctaccaacattattatacaagctgacagccgacagagaatgtaaatctatccattctttataaaagtgaatcaagcgcctgtttcacatccgccgttaaatcctcagtatcctcaataccgactgagatccgcacgagcccgtcggtaatgccaagcgcaagccggcggtcgcgcgggatcgaagcgtgcgtcattctggacggcacggagattaagctttcaaccgctcctaaactttccgcgatcgtaaacaggttcaatttttctaaaaacgcgtcgacgcgttcgctgctgccgacatcaaaggaaatcattccgccgaaaccggagctttgcgcttttgtcagctcatggcccgggtgtttcgctgatcccggatagtaaagcgtctgaacggcatcatgtgcttcaagcagctcggcgatttttccggcgctgtgattgatggcatccattctgagtcccagtgttttaatgcctctcatcaaaagccatgaatcctgcggtcctaaaacgccgcctgttgagttttgcacataatgaagcttttcgcccagttctttatcagccgtgacgactaagccgccgacgacatcgctgtggccgccgagatattttgtcgcgctgtgcagcacgatgtcagcgccgaagctgagcggctgctgcaaatacggcgtgtaaaacgtattatcgacgataagcaatacgcccgcttcttttgcgatgtcagacatcagtttgaggtcagtcactttcaatagcgggtttgtcggtgtttcgatataaatggctttcgtattcgggcgaatggcctttttgactttttcttcactgctcgtatcgacaaagtccgcttcaatgccgaagcggttcagcacgcctgtcatcacccggtaagtgccgccgtatacatcatccgtcaaaataacatgatcgccgctgtcaaacagcatcatgacggcagtaatcgcagccatgcctgagccgaacgcatatcccgccgcgccgccttcaagctctgcaattaagctttcaagcgccgtccgcgtcggattggccgttcttgaatattcataacccgtgtgctcgcccgctttcggctgttggtacgtgcttacttgataaatcggtacggaaaccgctcctgttttttcatctcccgtaattcctccgtgcaccatcagcgtttttttcttcatcttactgacctccttgaaaaatgtttttgcttatatatcgatcgctgccgtcagggaaaatggtgacgatatttgatccggcgggcgcttttttcgcttcttcaagcgctgcataaagagccgcccctgaagagcttccgattaagaggccttctttctcggccgcttctctgacaagcgaaaacgccgtatcgtcctccaccgtgtaaatggcgtcaaaatggttctcgtccatataatccgggataaactccatgccgatgccttccgttttatgggcatacggctctcctccgttcaggatcgagccttccggttcaacgatcaccgttttgacggcaggatttttctcctttaaataagctgccgtaccggcaaaggtgccgccggaacccgctcctgcgacaaaagcgtggatatccccgccgagcgcgttccatatttcaggtccgatcgttttgtagtaagtcaatggatttactcggtttttaaattgcagaacggcataagaattattaatctctctctccagttcaagcgcttttcggatggctccctgcatgccttcttctctcggcgtatgcacgatgtccgctccgagagctttcataatttgctgcttttctctgctgaaatgctccgggacgcaaaaaacggcgcgaagctgatgctttctggcgcacagagcgagtccgatcccggtgtttccggcagtcgcctcaatgataacgccgcccggtttcacctttcccgtgcgaagcgcatcttcaatgagcatcccgcccagcctgtctttaatgcttccgcccggattcatcatctcaagcttagcataaaccgctgttccctccggtagatcaaaatgcttgagacggagcagcggtgtatttccgatcagttctgtaatatctgttatcacgttcaatatatgtcctcctcctggaaaagcggaggagaacgagaatcccccgcttagtgaattcgtttgatgacattcaggacaagctcagttgaatgaacggcagcctgttctaaaaatttatcaaatgaaacgtcagattcttttccggcaatatcagataaagctctgatgacaacaaaaggcgttttgaactggtggcacacctgtgcgacagccgcagcttccatttcaaccgcgtacaaatccgcaaatttggcgcgtacgtcttcaacccgcttcggatcgttcataaaagaatctcccgttgcgattgtgcctttggcgacttgaatgccgttcagttcagaaaccgcttcctcagtaatgctgatcagcttttcatcagctttgtatgctgccggaagacccggcacctgtccgtattcatagtcaaacgccgtcacatccacgtcatgatggcggacatctgttgagatgacgacgtcgcctacattcaatgtatgatgaaaaccgcccgctgagcctgtgttaatcacataatcaggtttgaaacggtcaagcagaagcgtcgtgctgatcgccgcgttgactttcccgatacctgatttcagcaagatgacttcgacgccttcatagctgccagttgtaaactcacagtgagcgatcatctcttgttttgcgtctttcagtttgcttcttaaaatcgtaacttcctcttccattgctccgatgactgccagtttcatttatacacaatcccttcgatttaccgtttaatcgcctccattatccagacaaagtcattttgctgcgtaaaccgcgcggcaaatccctcttctgaaaagatgtttttcattgtcccgagtgtcggataatgttccgtctttaaatcatccgctaattgatgatagccgtttcggattgcttttttaatggctacatcataagcttcatgatctttaaagacggtatcggcaaacactattttatcatgcttctgaaggattgcgccatactgctttacagccgttcgcttttcttcatcggttaaatgatgaaaggcgtacgagctgacgatggtatctatttgaaaaggcggagcgggaaactccagaaaatctccgtcactgaacacggctttgtcagaaagcttgtcagccgccagttttctcattgacggagacggttctacaccaaacacctttttgttcgcggcggctaatttcgccgttaaattccccgttcccggtccgaactctaaaacgtttgaacctgaaagtgcgacgatgctgtcaagaatgttgtcataccctttaaaaacatcagcatattgtttgtctgccccgtgcactgtggcatcataagtcgctgcccaatcttcaaataatggaataaattcacggcccatatttttcactctccataatttataattcctatgagtatagtatggattaatcgtggaacagttcctatcctatcacaaaaaagaatggaagggtactaaaatactttgggattattgcgcaattacggcagaaaggcttatactttcattgactcagaagaaaaatcaggaggatctgtactgatgaattttcaattggatttaatcaaagataaagtagaatttttcgaagcggcatctttgcaggagcttgaaaagaaaataaacgttcagattgaaaacaaccaggcgattatgcttcgcgtccgttccgtatcccatcaggtgacggccgttgacggcagaatcctttacagcgcgtcggtgcatttttcagctgacgtatgacagaaaaaagcagctgaataatcagctgcttttttgcggttattttaaggtttctacttttgtcggcttccagccttttttgtctttccaagtgatggtgacctgatactttttgccgttcgttttgtctaaaactttacccttcgcatcttgcgggcttccattgtttccgagccacagcactgtcatatgatcttttgacacgcctgttgcgtaagagatggcgtcaagcatttcggaccagtcttcagagcttgagtcatacgtcgccgcatgttctcccgtctgctttgtgccgaccgctttccattttgggttaacaattgttttctcgacatcgcttgatgagccgccctctgttatttttgcgcctttaaaaggatcgcttgaatcagagtcttttttgctgctgtcatcacttttcgatgaatcatcgtcttttttgctgtcagagtctgaagatgaatcagatgtatccttatcctgtttatcttttttgtcatcgtctgatgccgtatcttttttgctgtcttttatgtcttcatcggatgtctgcttcgtcttgcctgatgcaggtgtttcctgcttctggcttgtatccgctttttcgctcacgtcgcccgacggactgttgatgaagaggctgacggcaacgacgacaataagaatagatacgatagcaattaaaatgttaagcaccatatttgcttttctgcgcttatcacggttttcaaaacgagattgtttattgctcaatcattctgcactcctttatccctcttgctcagcatatattttaacatgggctgagcggttgttctatgtctgatttatttcattttcatgtacctttttaacaatatcataaaacactgtatttgtcagagccttatcccccggcgtgtccatgtgcagcaccacgagagcatatttcggcttgtccgcgggaaagtatcccgcaaaccatttgtggtaaagcgtctgtttttcttttgtaaacattcccgtctgggccgttcccgatttgcctgctatctcatacggcagatcctgaaaccttcggccggttcctttcggtgaggtgacgacttctctgagaattttttgaagctgctgcgccgtatatttgtcgatgttttccccttttaacggctgatctttgaatgacgccatcgtcgttttgtttttgtattcaattttgtccgcgattttgacttgttttttttcaccgccgcgcgcgatcgccgccatcatattggcgacttcaagaggcgtgactttcacgtttttttgcccgatcgccgtctgtgcgacggctttttttacggttttgtctttgtcatctccccaaatgaccccgcttttttcattatacagctgcctgaatccgtcttcccggtacagcttgccttcccagcccgcccgctgggtgagaccaagtttttccgccatgttttcaataacggaatcatcttttttgatcaatttttccgcaaggcttgtaaacgtataattgcagctttgggcaaagctttctccaaaactgagcgtgcctttgtcatcccccggctctccgtacaggttgagattgcagttaaaggatgtgcccggcttcacttcgttttgttctattgcggctgcggcgatcaccgttttaaatactgatcccggataaatcggcgtcagcatgtaattttgcagtgtctgctgctttgacatgtcggcgtcaggctttgataccattccgagcacactgcttttttcaatgtctaaaaggacggctccccccttttttaacccgcggtctttcaatacatcttccattgctttttgaatattacggtcgatggaggttttgacttgcagcggataaaacgcgtttgcttcagccgtatatttgacgtccattccgaataaagggtttccccttccgtcgacatgatacaaaagttttgtgtcctgatccgccagtaaaaactcatcaaacgtccgctccatcccgcttgtcccgatctttgccgtgatcggcagttccttcctgccggggtatttctttttcaaaagctcagggtcctggtttgtcgcgcccaacagatgagcggctatgtttgtttctttgctgtctttcatatatacgccgtaaatgccgggatatttcaaagaattgatatttgacacggattgtttcgtcaaatgttttatttttctgctgttcaggaccaccggttttttcgcttccgtgagcagctgcctgagctccccctgtttcattccgagaatgtctgatacccggtcaaccggccaatcctgcgtcacgagaaagggaaacagtatgacggcaggctgcttttttccggtcagttctttgccgttccgatcaagaaaagagccgcgtccatctgaaataaggacttcttccgtccgctgcttgacgctttcctgaatcagattaatattggattttgaaaaagattctgtaaaaaacaactgaatttcagccagcctcgcaagcagaaagaaaaacacaagcagaaaacaaatcacggccgttttcagcctttttgatacgatcataaaaaacacctcatccacattttggacgaggtgtttcattgttaaacggatcttatgaaattttcacaattttcacgagcatttctccgcccggcgtctgaactgtcacttcttcgtccacttttctgccgagcaggcttttggcgattggcgagtcgtttgaaattttcccttcaaacggatcggcttcagcgcttccgacaatcgtgtaagattcttcttcaccgtccggcaattcgatgaatgatacggtttttcccaaaccgactacatttgaaccgccgtcgtcctcgatgattttcgcattgcggatcatgttttcaagcgtcgtgatgcgcccttccacaaatgcctgttcttcttttgcagaatcatactcagagttctctgacagatctccgaagcttcttgcgattttaattcgttctactacttctttacgtttaaccgttttcaattgctctaattcttgttctagtttttgttttccttcgtgagtcatcggaaaaactttttcttgtgccatgttccttcactccttggtggttgtccctcaacaataacgtgtgattatgtatgagagcataaacgaaaaaatcaagaatgagaacacagggcagtcctcgttcttctctcccatataggtactgtttatcttaaactgaatgtgtgttttctgcaaatgtttcggtttataaacagggaaagaagggaactgtctcattcccttccagcctatacataatatggtctgagttatttatgtctatgctatggtattacaaaattgcattttgttcaaggatcgtttgaatcttcgtgaccatcagatcaattgcgacgtggttttgtccgccttccggaataatgatgtccgcgtagcgtttcgtcggttcaacaaactgattgtgcatcggtctgacgacggacacatactgctcaatgacagaatcgattgaacggcctctttcgttaatatctctcataatccgtctgatgatacggagatccgcgtccgtgtcgacataaagtttcatatccatgaggtcgcgaagtcttttatcttcgagaacgagaatgccttccagaataatgacatccttcggctcaaccggaatggtttcctcagaacgcgtatgcagtttataatcataaatcggcttttctatcggccggtaattcaaaagctcttgaatatgctcgattaaatagtcattatcaaatgcgagcgggtgatcatagtttgtgttcagcctttcttcaaacggaagatggctttggtctttataataaaggtcttgctggatcattaaaatcgagtgtcctttaaactgttcatagatggaacgggtgacgcttgtttttcctgatccggaacctcctgcgatgcctataactacaggactcttacccattggtgattacttcccctttctcatcatgttgctcggataaatctttttgtctactttaaatgtaacgatttgcaggggatggcgggcagcatcaagctcgtttccgtcttcgtcccaaatagtgccgactgtgaatgtgaaattgtcgatttcaggaccgaaaaattccacttcgtcaccttgtttaaagaaattgcgctgctggagcgtcaccatttgagtttcctcgttatacgcgagcacgagaccggcaaaatcaaatgttgttttctttccgtgttcgccgaacatctgctcttcatacccgggcgtgccttcaaagaaagcaggcgcggtatcccggtttgcacatttgtccagctcatccagccattctttttgaatgacaaagttttcaggatcagcgcagtatgcgtcgatgactttgcgatacacgctgacaaccgtcgcaacgtaatgaatcgatttcatccggccttcaattttcaggctgtcgatgcccatctcgatcatttgcggaatggattcaatcaattttaaatctttcgggctcatcgcaaacggagcgtcttcttcgtcatagagcgcgaccgcgtttgcaccgtctgtctgatacaggtcataatcccagcggcaggactgacagcagccgccgcggttggaatcccgggctgtcatgtgattgctcagcacgcatcggcctgaataagcgatacacatggcgccgtggataaaggtttcaatttcaatatccaccttttccttcatttctttaatttccagtccgctcgtttcacgggcaagcactacgcggtcaagcccttcttctttccagaactgcaccgctttccagttggaaagggactgctgtgtactgaggtgaatttctacgtccggggccactctccggcatgtttcaataatcagcggatcagcgacgataattccggcaacttttgcgtctcccaacgcttttaagtattcttccagaccgtccatattttcattatgggcgaaaatgtttgttgtcacatatatttttgccccgtattttttggcaaattctacgccctctgcaatttcttctattgagaagttatccgcatttgagcggagtccgtattcctgtcctccgataaaaaccgcgtccgctccgtaatgaacggcaatttttaatttttcaaggtttcctgccggagcaaggagttcaggttttttcgtaatgacgcgttttccgtttacgactttggaaatggtttgatttacggctgtcatccgttgcaccctcctttttaatagaccgtttctttaaagaagaatcctgtgtcgatgcttctgttcacaggctgaatgctttcaatccgctctatccagctctcttttttctcttcgtatgtctctcggctttcgaagcacagatcgattgcttctctgtacatgcgggtcacttcagttaagtattcaggagacttcaaaactccgtcgattttgaaagaatcgatgccggcgtccatcaggtcctctaattcatcaatcatgcacacatcgttcgggctcatgatgtgcgtgccgttttcatcttcaaaaatcgggtatttattgccccgttctttgtcatgcagaaacatccccgcttcttttttcttctgttcgatgtccatgactttaccctggtattcgaagtaatggcccactaaagaacgcttcgattggaacatgcacgtcatgccgtggatttgaatttcaatttccacttcggcgttttcttttatgtcaatgatgctgtccatatttaattccttagccagcactgcccgccgtgcgcctttgcgtccccagtaattgcaggaatagtagttggttcccgttgtttccgtgctccaatgcagtttaagctcgggagccgcttcacgcgccgccattaaaacggccggatcaccgaaaacagccgcatcaacgccggcctcctgcaaaaaggcaagatagccgttcagctcgtccactttttcgttgtgaaaaatagcattgacggcggcgtacactttcgcgccttcctgatgagctgtctttacggcttcttttatatcttctcttgaaaattcaccggccagtctcaggccgtatctctgttctccgaccaacagggccgttgcgcccgcttgaatgagcggaagaatatcctgtacagaagtcggagtcaccaaaagttcaggttttttcatgatccttcacctcttctttttactgatggcgatgccgtctccgaccggcagtatgaccgtttgatagtcaggccggtccatcagccattggttatattgatcaattttttcaacaagcttccgtcttcttttcggctcaatgtccgagtgattttgcgccaccagccctttaaacagaacattgtccgtaaaaatgactccatccggcgcaagcatcggttcatagagctcaaaaaagttcgtgtactggcctttggccgcgtcgataaaaatggcatcataaggagccgtgacacggacagactcagaaagttccagcgcatccccgtgcattacgtgaatccggttttccatttcaaagtcttttatattgttcacagcttcttcatagcgtttgtcgtcccgttcaatcgtgtaaatattcgcacccgaaagctcaagcgccatccgtatggcggaatatccgattgccgcgccgatttccaaaatgtttttcgcctgttgaatcgacagcatttgaagcagcacttcaatgcccgcttcttccataatcggaacatggtgctcttttgcataggcttcaagctttttcactttatcaggccgaggcttcagcatcgcgtttatatactcgtttatttgttcataccgatcattcacggcaaacagcctccgttctaaaaaggagtgcccctgacgaatccgcggggacactctcttaagacacttctttatccataagtaaacaacccgatatattttatcataaaacctttcagaatggaataaaaggagagcttttgccctccttttattcgctgtcttttttggaaatatacttttccttcgctttattatggtcttttaatgttttggtgaaaacgacctcgccgtttgattttgcaaggaaataaagataatccgttttttcagggcggagagccgcttcccatgatgaatcaccggcatttgcaatcggtcccggcggcagccccttatgtttatacgtattaaacggagaatcaattttcaggtctttgtagtagacccggcttttatgcttaccggccgcatataataccgtcgggtcagtctgcagcggcattttttctgcaagcctgttgtaaaaaacgctggcgattttgtgacggtcggctttggcggtggcttcttcttcaataagtgatgccatcgtcagcgcgttatggacggaaagtttctttttttccagttcagatttatacgtttcgatacgggtgtttgtttcctgaaccattgccgtcaaaatcgtgtcaagcgatgcatccggatcattaaacggatatgtggccggatacagatagccttcgagcggatgcttgagcttcttgtttgaaagtgcgtccgttatcgtatcaggaaactgtttcttcagtttgccgatgaatgttttgtcatccagtttcgccatgatctcttcttttgaatatgatgtttcctttgcgatcgcatccgcaatctgtgtaagctgttttccttcaggaacggagatctgaaaggcatatcccgttgatcccgcggtcagttttttgataatcgcatccgcatccattcctttattcaggtggtaaaatcccgcctgaaacccggaagcgcctttatacttcacatacagctgaaatgcttttttgcttttgatgacatgctgatcctcaagaatttcagcgattgccgaaacggaagaaccgctcggaatattaatattgactgccgttttgctgcctttgtcaaccggggacagcagagattttccatagaaaaaagcaccgcaaatgatgataagcagagcgatcacggaggacagtattatcgtcgtttttttgtttttacgcggaaatgaatgtttagtctgattgatattcatacaagtattttcctcccaacagctcttatactacatgattcgtgtgcattcggcaatttattacaaaaaaaagccgaagcgcatatgcgctccggctttttccgttcattttattcttcgtcttcttccgctaaaaacgtgttcagcgtttcttcgatcatttcccactcttcatcggtttcaatcggcatcagttcgccgtcttcaccgttttcgttcggttcgaagcttgaagcgtgaatttcgatttcatcatcgtcttgagcatcaatcggataataaagtacgtaagatttgttgaatgtgtcgttttcaaatgtgaacagcacttcgcaaagctgttcgttgccttgatcatcgacaattgtaatgtgtttttcgccgtgttccatttttttcacctcttagtttaaactgtccagatatccttgaaggatcatgacagccgccattttatcaatgactttttttcgtttttgcctgctgacgtcagccgcgatcagcattttttcagccgccatcgtcgtcagacgctcgtcccacagcacaacagggacattgtacgctgtttcaagcagtttcgcaaatgtttggctggcttcgcctctcggaccgatcgtcccgttcatgtttttcggaaaaccgagcacgatcttctctacattatagtctttcatcagctcggataaacggtccagaccgtaatctccttcagcctcgtttatttttatcgtctcaatgccttgagcggtccagcccatttcatcgcttaaagctacgccgagtgttttcgttccaagatcaagtcccaatattctcatgaatgtatttacgcctctttatgctgttctagataggattttaccaattcctcgattaattcgtcacgttccagtttgcgaattaagttccgggcgtcgcgatgcctaggaatgtatgcaggatctccagacagcaagtatccgacaatctggttgataggattgtaccccttttcctgaagcgcatcatataccgtattcagcacttcttcgacgtttgtttcagcagaatcatcggagaaattaaatttcatcgttttatcaaacgagctcaccgttttgcacctctttcccaaattcgcaggcaaagttcagcctgaggtcctcatcttatcatcattctacactacttgaaaggattataaaacggattttatccaatcttccgcagatgccagcgcctcttccaatttttcaggctgctttccgccggcctgcgccatgtccggacggcctccgcctccgcctccgcagacttcagccgcttgtttgaccattttgccggcatgaaggcctttttcgatcaggtctttcgtcacgcctgctgaaaggttgactttctcattttgcacggcgccgagaatgatgaccgcagaaccgagcttcgctttcagatcatccaccatagtgcgaaggtggttcatgtctttcgcatttactttttcagccagcacttttacgccgccgatgtcttttactttagacagaatggctccggcttccacattgccaagtttgctgagcaatgattcattttctctttgcgcttccttcagctccgcttgaagagactgaattcgcttcggtacgtcttttacgtttgatttcagctcgtccgcagcgtgctgcagaaggctgagctggctgttcatttcctgataagcgccttttcctgttacggcttcaattcttcgcgtccctgcgccgatccctgattcggatacgattttaaacaggccgatttcagccgtattcgtgacatggcatccgccgcaaagctcaaggctgtaatctccgacttgtacgacgcggacaatatcgccgtatttctcgccgaacagggccatcgcgcccatttctttcgcttcattgatcggtttcaaatcaatcgctaccggaatgctctcccagattttttcgttgacgattccttcaatgcgttcaagttcttctttcgtcacttgaccgaaatgagagaagtcaaaacgcaggcgattttcggtaacgagtgaacccgcttggttgacatgtgtgccgagaacgtctttcagcgcctggtgcaggaggtgggttgccgtatggtttttcaccacgccgcttctcatttgatcttcaacttcagccgtcacgcttgcgcctttttgaatcgtgccgctagccaccgtgccttcgtgtacatgctgaccgttcggagcttttttcacgtctttaatggttacgacagcctgctcgcttctcagcactcctctgtcaccgatctgtccgccgctttcagcatagaaaggcgttttgtcaagaaggatttggacggtatccccttcatgcgcctcgctgattaattgcccgtcatgaagaagctcgatcaccttcgcttcagcttttacggcactgtagccgacaaatgtgctttctgcggtaatgtcgcgcaatgcgccgccctgcacctgcatgcttcctacatcttggcgcgcatttctcgcccgttcacgctgtttttccatttcggcttcaaagcctttatggtcaaccgtcatttgctcatcttccgcgtattcctccgtcaattcaaccgggaatccgtacgtatcgtacagtttgaatacgtcttttccggagatgatgccgctgcctttttccttctctttctttatcacgtcggataaaatggccagaccttcgtttaatgtttcgtggaagcgctcttcctccgttttgatgactttggcgataaactcttgcttttctttcacctccggatagaaagcgtccataattcctgcaacagtcggtactagttcgtacataaacggacggctgataccgatggttttcgcgtatcgcactgcccggcgcaagaggcgtctcagtacatacccgcgcccttcatttgacggcagagctccgtcgcttaccgcaaatgcgaccgttctgatatgatcggcgatcactttaaaggccgtatccttcactgcatcctttccgtaagcatctccggaaatgcgctctgttgcttcaataatcggcataaacaaatcagtgtcaaagtttgtcgggacatcctgaatcacggagaccatccgttcaagccccatgcccgtatcaatgtttttcttcggaagcggtgtgtacgtgccgtccgggttgtggttgaactctgagaataccaggttccatacttcaagatagcgatcattttcgccgcccggatacaattcagaatctgacgggtcattgccgtatttctcgccgcggtcatagaaaatttccgtattcggtccgctcgggccttcgccgatatcccagaagttcccttccagacggatgattctttcttccggaacgccgattttttccgcccatagcgtataagcttcttcatcctcagggtgaaccgttacagacagcagctccggatcaaagccgatccacttttcgctcgttaaaaactcccatgcccacgtgatcgcttcttctttaaaataatcaccgatggaaaagtttccgagcatctcaaagaacgtgtggtggcgcgccgttttccccacattttcaatatcatttgttcggattgatttttgcgcgtttacaattctcggattctccggcacaacgcggccgtcaaaatattttttcagcgtcgcaacgccgctgttgatccataataaagacggatcttcatgcggaaccaatgaggcgctcggttcaacggcatggcctttttctttaaagaaatctaaaaacatttgacgcacttcagcagaagttaagtgtttcatctatattcctccttatcactacccgaaattctcttttgcgacagcaaaaaagctctctccctatgcaaaccatgcgttcacacagggacgagagctgtctcgcggtaccaccctgattacaggccgaaaaaggcctgtcacctttcatcccgtaacgcaggactgcggcagcctttaactgcactcaggattagcttcggccgatcttctgctgaagctcctttcagcgtatcggagcttctctcttaaacagggcttcggcgtactcatatccgtcactcgagattcgtatgtattctactcgaaattatagacaagcagaacccgaatgtcaatgttccgtcctgatccgcaaaaagtgtatggccgtcacttttaaaacggctgccgccggaacagcgagaatcatgccgggaatgcccgcgagctctcctccggcaaggagcgccagcatgatcacgacggggtgcattctgagactgcgcccgacaataagcgggctcaaaatgtttccttctataaattgcagaataaaaatcgtgacgattacgatgatcacagctttagcagaaatcgccagcgaaaggagcagcgccggtacagcgccgataaacggaccgaaatacgggatgacattcgtaatcccgatggcaaggcccaaaatcagcgggtaaggaagcccgaacagccaaaatgaaacgccggctattaacccgagcaaaaaacaaacgagaagctgaccgcggatgtaatcaccgagagagtcgtccacatcccgcagaaattcactccccctttttctccaggacttcggcgtcaaataccagactgtctttttcatgacgtctatatccttcaccatatagaacacgagaaaaggaatcgtcgccgcgatcaggatataatcaagcacgaaacggatgcttctgatcgtgctttcaatcgtgccggcaagaaacgtttctgtctgctgaatcattttgtccattcgatggtgcatgccgtcaggccaatgatccgtgtgattatgcagatgcttcagcatgctgttgtagtttttggcaagaccgggaatgctctcagaaagatcctgcagctgttcaattaaaacaggaacccctttataaaccccccagccgattccgccgaaaaacaggcaataaatcagaagcaggcttaaagttctaggcatcccttttctatgaagccattcagtaatcggaagtaaaagataagcaataaatactgcgatgaatataggaataaagagagattttataacaagccaaatgggagaccataacatatcgagcatgcaaaagacatacactgttaacaaaacgagcagacatacagccgtccacattaagagctgcagcggtttttgaagcatgacgtttcacctcttgctttatcttttgacagaaagccggaattattcccgtttcataaactccgccttatgacgcagacctcttgacggaaacaattatcagaaattacaaaataatctaaataatattcataaaaatctgcataactatcgtaatgtgttaaagggttttaaaactgtccagtcaatatgactcatgttttttaaggaggatggccatgatttcatttcaggatgtaaataagcactacggacatttccacgtgctgaaaaacattaatctgcacattaaaaaaggggaagtcgtcgttatcatcggaccttcaggatcgggaaaaagcacgcttctccgctgcattaatcagctggaaacagttgatggaggcgccttaacggtaaacggcgtctccatccatgacaagaaaacggatataaataaggtccgccgcaatatcggcatggtgttccagcattttcatctgtacccgcacaaaaccgttctgcaaaacatcatgctcgcaccgatcaaagtacttaagcaatcaaaagaagaagcaaaagaaacggccttatactatttgaaaaaagtcggtataccggaaaaagcggacgcttatccttcacagctttccggcggccagcagcagcgtgtcgccatcgccagggggcttgcgatgaagcccgaaattatgctgtttgatgaacccacatctgcgcttgatccggaaatgatcggggaagtgctggatgtcatgaaaacactcgcaaaggaaggcatgaccatggcagtcgtcacacatgaaatgggattcgcaaaagaagtggcggaccgcatcgtgtttatcgacggcggagccatcttagaagaagctgcaccggctgaattttacgaaagcccccgtgaagagagggcgcgtttattcttaagccgtattttaaatcactgaaaagaaacggaggagcgcttatgtcacgcgtaacaaaatggctgtcattcggattgatatcactgctggccgtctttatgctggccgcctgcggagggaaagaaacgtccggagattcaaaaggaacgggaaaagacacgttagcctctattaaagacagagacaaaatcatcttcggcgtcaaaaccgacacgaggttattcgggctgaaaaacccaagctccggtgatattgaaggcttcgatattgatatctcaaaacagctcgcaaaagatattctgggggatgagaagaaagcggaatttaaagaagtgacgtcaaaaacgagaattccgatgctgcaaaacggcgatatcgacgccatcaccgccacgatgacgataacggatgagcggaaaaaagaagttgatttctcagatgtttattttgaagccgggcaatccctgctcgtcaaaaaaggaagcagcatcaaaagcaccgaagacctgggaaaaggctcaaaagtattggcggtaaaaggctctacttcctcacaaaacatcagagaaaaagcgcctgatgcctcagtgctggaatttgaaaattacgccgaagcgttcactgcgcttaaagcgggacagggagatgcgctcacaaccgataatgcgattttatacggcatggcagatgaaaataaacaatatcagctgacaggcgaaaccttcaccgatgaaccttacggaatcgccgtcaaaaaaggccaatccggactcatcaaggaaatcaacgcctctttgaaaaaaatgaaagccgacggcaggtacgaaaaaatctataaaaaatggattaaagaagaaccggcaaaatagaaaggatcgcgggatgagcaggcatgctcatccccgttttataaggagtgacatagatgaacttttcaattttaacggaaaacttcgatatgtatatggacggtttcctgcacacattgcttgcgagcttcatcgcgctggcaggcagctttgcgctgggcgttctgatcgcagtcatgagaatcacggctttcaaaccccttcaatggatcggcactgcgtatgtggaatttatccgcaacatcccgcttctcctcatcacattcgttttttatttcggacttccgaacgccgggctgagattggacggctttcaggcgggaacgattgcgcttacgatatacacgtccgcctttatcgcagaagccatcagagccggaattcagactgtctccaaagggcagatggaagcggccagatcgtcaggcttcacctacagtcaggcgatgagatacgtcattcttcctcaggccgtaaagatcgtgattcccccgctcggaaaccaatttctcaaccttgtcaaaaactcatcaatactcggagtggtggcgggactcgatttgatgtatcaggcggatctcgtttcctcaagcactcttgtcgtgtttgatgtctatattttcgtcgcgcttttttatttgatagtaacgatcccgctcagcatcggggttcactatttggaaagacatctcggaaagagttattagagaaggagagtgaaaaacatggattttagcggcgcctatacacctgaccatctgctgtttttatgggatggctttttggtcacactttatgttgcgctgatctccattgtcctgagttttattttcgggcttgccgccggcactttgcgctatgcgaaaattcctatcgtctcgggcattatagcggccattgtggaaaccatccgcaacctgccgctgttattaatcattttctttacgttttttgcccttccggaaatcgggatcaagctggaaattaccgcggccgccatcacggcgctgacgatttttgaatcggccatgctgtcagaaatcatcagaagcggtttgcaatccgttgacaaaggacagattgaagcggcgcgttcttcaggactgacgtacacgcagactctttttctcgtcgtcatgccgcaggcgctcaggcgtatggttcctccgatcgtgagccagtttatctccttattaaaggatacgtcacttgcggtcgtcatcgctctgcccgaactgattcataacgcgcagatcttaaacggacaaagcgctgacggagggtattttttcccgatctttctgctggcggccctgatgtatttcgcggtcaattacagcctgtctctcgcagccagacggctggaagcgagacaaacgtaaaaaggatacttccggagaagtatccttttttctgcttaaaacattttcatgactcgtcttctcatccgtttcataccttttttattcagcatatcggattgagaagccatacgatacataacggctccagctcctaaagccaacagagaggtcattgttctgcccatcgcgcgtatctcctttcaactttaaaaattgatactgcgttcgtcttcagaaaacaaatcatcaagactgcttaatgtgccgtcttcctctacttgatgtgtcgcaattttgcctttggccaccgtcagctcaatgaagcagccccagcaatagtattggtttacgccgattttgccgatatctttacttttgcagttcggacatacaagcacagactacacctcttatccgttcaggacgatgccttctttccccgcttcaataagcgtatcggcggcgcggcgcacttggcgtctgcctgccagatctgaaaagaagccgtccgagagttcatatgctacgattatgcccctgtccaaacaaaagtatacatcttccagcaaaccgaacatttcaccattaggcgatttcaccggctgcatcttaatctgttcaaaggtgaaacagctcttcggcaaaggctgcaaatgagcatgaccggcagctacggcttcttgatccatctcttttatatcacttgcctctaaaaaaagatggcggttgtgaaacaggcgtttctgctccagcacgaaaccgagaaaccggccgtccagagagaaacatacatccgatatcatcccgagactgcgcccggtgttttcgtcatatactgttcgtccttcagctgcatggcatgttctcaaagtgtgatcaaccaccttttgttgaacacgtataggttttgccaagaagccgggcagcatactttgaaatgacttccacaggcgaaaacccggcgcatgtttatactccgggttttatttacgctttttcttccataaagtcaaacggcgtgatgccttccattccgatgttcgcatcatatacactgaacggcagctctttttgcagggcggccagttctgcatccatctcttcagtctgctctgtgagcctgtttctaagcgacgtctgtctgacggtggcatcattgtttttgacgccccattcaagcgcttcttcttctccgcaaagaatcagaaattttttcgcccttgttatggcggtataaagcagatttctcctgagcattcgatagtagcctttgacgacaggcaggacgacaatcgggaattcgctcccctgcgacttatgaatggaacagcagtacgcgtgggtaaactggctgaaatcctttttcgtaaaggtgatttcattgccgtcaaacgagacgacgaccatgtcttctttttccgtattttctttggcataaaaaatggatacgatttcgccgatatcgccgttaaacacattgttttccggctggttgacaagctgtaatattttatcgcccgtcctgtagacgacatcaccgaatttcagctcccgccttttttctttcggcggattcatgatgtcttgaagaagcatattcagctcgttaattcccgcttttcccctgtacatcggggccagcacttgaatatccctggaggtataccccttttttaacgcgttcgagacaacctgatccacgacttctttaatctgtgaagaattacagcggataaatgagcggtcctttgtcggcgcggtcagccccttcggaagcagtccttttttcatatcatgcgcaagttccacaatggatgatccttcagcctgacggtaaatatctgtcaggcgcacggtcggcagcacctcagaagccaaaaggtctctgagcacctgtcccggtcctactgaaggaagctggtcttcatcaccgacgacaatgagctgaatgtgcttaggaagcgccttaaacaaatggctggcgagccagatatcgagcatactcgcttcgtctataatgatcagtttcccttctatcggctgatcttcattgtaggtaaagccttcagcgccattccagccgagcagcctgtgtatcgtaacagccggcagacccgtagattcgctcatccgttttgcggctcttcccgtcggcgcggcaagcagcaccgggaacgtctcgtcttttttataatcaccggggtcaagcgatactccgtgcagttcactgtataattccacgattcctttaataacggtcgttttccccgtcccgggtcctccggtcagtaaaagcatcggtgaagacagcgctttttgaatggcatccttttggcttggcgcgtattgaacattcatccgttcttccagttcaccgagtgcaagcagaaattccgattcaggaaattgatcggcatactccgtttgagccgcaatgtcgagcacgcgttttgcgacattttgttcggcgtaatacaaggacggaaaatagcagcgttctccttctatgacgatatccttactctccccgagggcgatgatgccgtcagccgcatccatttccgtgacgcggccgccttcagctgactgattcaggagcgtttgcgtattgattatcagctgctttgtttctatgtacgtatggccctctgaaagacaggtcgattcaattgtatataagatagccgctttgatccgctccgggtggtttcctgacagacccatttttccgcccagctcgtcagctttcacaaagccgatgccttcaacgtcttttacaagctgataaggattttcctgaattttctccagtgtttccgtttcgtaggcctgatatattttcatggatagctggggcccgaaaccgtattggttcagagagatcataatctgctcaagcccctgatgccgctgcagctctccggcaagcttatccgctttctttttcgacattttcggcacatcgtaaagcaccgatgcatccgtcagaattttattgagcgcgccgtctccgagctttttgacgatttcttccgccgttttttttccgattccttcaaacagatcacttgataaatagtgaatgatcccttcttttgtggtcggaatttcttttttaaagtgttcagcctgaaattgcaggccgaacttaggatgcgtggcggtttttccgtaaaatgtgtaggtctcatcttcttgcagcagagggaagtagcccgttacggatacgaccttgtcttcgatcgcctcagacgtttctgcaaccttgactttcagcactgtatacaggttggtgtcattatgataaatgaccgtatgaatgacgccttttacatacggctgttcttcgatgttcagctgatccacgagccttccctccttttgttatgactgggtgataagctgtttcgcatgaagcgcaagcatatgatcaggctgtatgccgattgcgccttccagcatctcaagcgccttttcacgattttctttgtacgcgtaagcgactccggcattataaaatgcgtccgcgtggcttgggtcctgctcgatcaccgtctcaaactgcgccagagcttcatccagcatttcttcatttgcgaggcacattccgaactggaagcgtgcttccgtgtcattttcgtttaattcaacggcacgctgcaaatacggcagtgcaagcttcggccgctctaatttaacgagaacggtccccagcatataaaacaaatctccgttttccattccggagcgaagcgctttttcaaacatatccttcgcttcggaaaacgattctttcatcacatatacgtttcccgcaccgtaataagcggctgccgccgaattgtccaattcaagcgctctgttatagaatgcaagcgcccgttcgagttcgttcacagaagaaagcagatttgcgaagttgatatacggcaccggatcttggccgttttcctcaatcgctttcgtaaaagcctctgccgctttttcaaaatcgccctcctgcatggcgtcaatcccgattttattataatccatttttaacttcctttcgctaaaaaaccccaacatgcgagttgaggttttttacatgtgttatacgtaccacagttttgttccgtctttataaacgtcatctatcgttccgccgccgaggcactcttctccgtcataaaaaacgacggcttgtcccggcgtaacggcgcgtacctgcccgtcaaaaatgacttccgcttcatcatcacccgtcattttcaccgttactttgtgatcttcctgacggtagcggaatttcgccgtgcatgtcatttcgccgccgtccatcagaccgggacgcgtccagctgacatttgtcgccgtgatcttatcagaatacagaagcggattatggaatccttgatcaacatacagaatgtttttttcaagatctttaccgacggcgaaccacggctcgccgcttccgccgattccaagaccgtggcgctgtccgatagtataatacatcagaccgtcatgacgcccttttacttctccgtccattgtcatcatatcgcccggctgagcggggagatattggctgagaaacgttttgaagttgcgttcgccgataaagcagattcccgtgctgtcttttttcgcagctgtcgcaagttccgcttctttggcgatttcccgcacgcggcttttttgcagatcaccgatcgggaacatgactttgctgagctgttcctgattgagctgattcagaaaataagtctggtccttgttttcatccagaccgcggagcatgcgcactgtacctgcgcttctgtccacgcgggcgtaatggcccgtcgcaagataatccgcgccgagtgacagagcatgatccaagaaagccttaaacttaatttctttattgcacatgacatccggattgggggttcttccggctttatattcatcaaggaaatattgaaataccttttcccaatattgcttctcaaaattgacggcataatacggaattccgatttggttgcagacccggatgacgtcttcataatcttccgtcgccgtgcaaaaaccattttcgtccgtatcatcccagtttttcataaagattccgattacatcgtagccctgctccttcagcagaagggccgccacggaagagtccacgccgccggacatgccgactacgactcttgtatcctccggccgtttttccatttgcattcactccattaaaaacgtaagtccgccgttttaagcaagccgtttaacgacggcggcaagcttttcggcggctgtttcgatttgttccgccgtattgccgaggccgaagctgaggcggattgacgaagtcagcctgccgctctcacttccgaacatggccgtaagcacatgggacggaagaacggatcctgccgtacaagcagatccgctggagacggcaatgccttccatgtcaagattgaccagcagcgcttccaccggcacaccgggaaagtaaaggtttaaaatatgaggcaggcatttctcggcatctccgttcacctccgctgtgacgccggatttttccagcgtgctcatgataatgttcttaaactccttatacttcgctgttttctcttccctctcacggtttgaaaggacgaccgcttcttttaagccggcgatgcccggtacattttccgtccccgcgcggcgctttcgttcctgctctcccccgagaagaatcggtgacagcttcacctcttgatttacatataaaaagcctgtccctttaggcccgttaagcttgtgaccggaaacagacagcatgtcaattctgctttttttcacgtcaatcggcatataaccgaatgcctggacggcatctgtgtgaaaataggcctgatgcccgcttaacagctctccgatttcgtcaatcggctgaatggtaccgacttcgttattgccatacatgacggtaacaaggattgtatcatcacggagcgcttctttcacctgatttgcactgatccgtcctgaagggccggggatgaggtatgtcacctcaaagccgtcttcttccagcttttcgcaggcgtgcaatacagcatgatgctcaatagcggtcgtaatgatatgcttaccttcattcttccgggcggcagccgttccgaaaatcgctaaattatcagcctccgtgccgccgcttgtgaaaataatttcctgttctttcgcactgatttcgcgcgcgatgtccgctctcgcttcatcgacccatttccgggattctctcccgaatgaatgaatgcttgacgggttgccgaaaccgccgaagaaatggggcttcatttcttcgagcacacgctcatccatcggggaagtcgcggcatgatctaaataaatccgttccattgtctgtacacctctggtttaaatatagaacatataagcttcctgctcgccgtccgtatagctcgcaaggtcttctaacgtcgtgctgtccagcacgtcttttacagcgtcgcggatgcggatccataactcccgcttggcaggctcttcatcctcaagcacttctaccgggctgatcggcccttccagcactctgataatatctccggccgttatctcttcaggctggcccccgagcacgtaccccccgtaagcgcctctgatgctttttacgagtccggcgtttctgagcggtgatacaagctgttccaagtaatgctcagaaaggctgtttgtttgggcgatgcttttgagcgacgtcggaccgtctccgtgctttttcgccaattcaatcataatggtgagcccgtatcttccctttgtcgatattttcaatatgaacaccccagtcaattctaattgttaatttatacaagtaaatggatatgaataatctgtttagtatcttatagaccaactgttattataacataacttatcctaattttcattgaaacacggggcccgccgcaattcgcttttctaatcgtccgttttccgttaccctgtatatgtaaggagagatgttcatgaaaccattggcgtatcggatgcggcctgccaatatcgaagacattatcggccaggaacatttggtcaaagaagataaaatcatcggcagaatggtgcgtgcaaagcacttatcatccatgatcctgtacggaccgccgggcatcggaaaaacgtccatcgccacagcgatcgcaggatcgacaagcatcgcattcagaaaattgaatgccgtcattcataataaaaaagacatggagattgtcgtacaggaagcgaaaatgtcaggccaagtcattttaatccttgacgaagtgcacaggcttgataagggaaagcaggattttctgctgccctatttagaaaacggcatgattattttaatcggcgcgacgaccgccaacccctatcatgccattaacccggccatcagaagccggacccagatatttgagctcgaaccgttaacacccgatctgatcaagcaggcattgaaaagagcgctcacagatgaacaccggggactcggttcctacagcgtttcggtggacgacgacgcgatggatcatttcgcacaagggtgcggaggagacgtccgctccgctttgaacgcactggagcttgccgtgctctccacaaaggaatcaagcgacggcacgatccggattacacgggagacggcggaagaatgtctgcagaaaaaaagctatactcatgataaaaacggcgatgcgcattatgacgtcttatccgccttccaaaaatcaatccgaggctcggacgcaaacgccgcccttcattatctggcccgtctgatcgaagcaggagaccttgaaagcatatcaagaaggcttctcgtgatcgcctatgaagatatcggcctcgcaagcccgcaggcaggcccccgggtgctgagcgcgattcagaccgcagaacggatcggctttccggaagcgagaattccgctggccaatgcggtaatcgaattatgcctctcgccaaaatcaaactccgccatctcagccgttgatgaggcgctcaaagacatcaggacgggtaaaatcggcgatgtgccgaaacatttaaaagacgcccactataaaggggcccaagagctcggacgcgggatcggctatcaatatcctcacgatttcgagaacggatgggtcgaacagcaatatttgcccgatccgttaaaaaacaagcaatactataaaccgaaacaaacggggaaatttgaagccgccataaagcaagtgtatgaaaaactgatgaagcagaaaaaataaccggacaaggacaccctatgtgttcttgtcttttttgataccggccaagatctttcgtgtaaacggcggattcaaataaaaaaacagcctttcctgaagaaggctgtttttctttttatttatctttaacccgtttaatgtcgatgtcctttaagagctccatgacaacatgtccgcccataatcagaccggccactgacggaacccaggcgttggaagacggcggcatttgcgctttgcggattttcgcttcatcattcccgacttcttttctgacgtcttcacggatgacgatcgggctttcatcagaaaaaatgacctgtacgccttttttaatgccctctttacgaagccttgtgcggacaactttggcaatcggatcggtatgggtttttgaaatatcagcaatctgaaagcgtgtcgggtctgttttattcgccgctcccatgcttgaaatcagcggaacattccgtttcagacattctttcatcagatgaattttataatgaattgtatccgacgcgtcaatgacgtaatcgagcggatactcaaagaactgctcatacgtctcttccgtataaaacatttttaaggcgacgacgtcacaatccggattaatatccgcgatccgcgctttcatcaagtctgttttcggctgtcccaccgtcgacaagagcgcatgcagctggcggtttacgtttgtaatgtcaacatcatctttatcgacaagcacgatccgccccactccggacctcgccaatgcttcggctgcgaatgaaccgactccgccgacgccgagaacggccaccgtgctgttttttaacgtgtccagcccttcttttccaatcgctagctcatttctggaaaactgatgtaacaagaacctcactccacattctggttttataaactcggcttgtcaaaaagccgctggttttagcgcacaaaaaataaagtcccaattgtgccgttgcagctttccttcgttttgaacccgctctcagcaggtgggtgcccttttttaaatcttgtaagtcctcttaacgaatgaaaagaggcatgtacgccatttaaaaatgcgggctcccaaatcaaaaaaatgttcggtcaaaactaggtgtacaactaacacatcaggactttatttaacttgtcaaaatcatatcacagcagattttgattttcaagaaacaaactgctgatctttactgtttcacttttcttttgacagaaaggtgaagttcttcaagctgggcgtcgctcacttcgccgggcgcttccgtaagaaggcagcttgcgcttgccgttttcgggaaagcgatcgtatctcttaagtttgtgcggcctgcaagaagcataaccaaacggtctaagccgagcgcgattccgccgtgcggaggggcgccgtattcaaaggcttcaagaaggtatccgaactcctcctccgcttcttcttttgtaaagccgagaagcccgaacattttttcctgaacgtctttttcaaaaatacggattgagcctccgccgagttcatagccgtttaagacaaggtcgtaagcctgcgctttcatatcttcaggcgccgtttcaatcaggtcaagatcttcacggacaggcattgtaaacggatggtgagccgcatagaaacggccttcttcctcgtcatgctccagtaacggccagtccacaacccacaggaagttgaagaggctttcgtcaatcaggccgcgttctttgccgagctttaagcgaagcgcgccgagggattgagccacaacctcaaacttatcagcgccgaacaggagcagatcgccttcagaagcatcaagcgcttcagccagttttgcctgcttctcttcatcaaagaatttcgcaatcgggccttttacgccgtcagcttcaactttcacccaagcgagacctttcgcgccgtaatttccggcaaaaacgccgagcgcatcgatatcttttctggaatagtcgccggcagcgcctttgacattgatcgcttttacaacgccgccgtttgccacggctgatgagaacaccttaaattcagtatctttcactatgtctgacacgtccgtcagcagcatgccgaagcgggtgtcaggcttgtcggaaccgtagctgttcatcgcttcttcatatgtcattcgcggaagcggcagcggtacttcaacaccttttgtttcaagcatgactttcgccatcatctcttccgccagagccatgatgtcctcttgactcataaaggacatttcgatatcaatctgcgtaaattccggctggcggtcggcacgcaagtcttcatcgcggaagcagcgggccacttgataataccgttcaaagcccgacaccatcagaagctgtttaaaaatctgcggcgattgcggaagggcgtaaaattccccttcatgcacccggctcggcactaagtaatcacgggcgccttcgggagagctttttgttaaaatcggtgtttcaatatcaagaaatccgttttcatccaagaaatggcggatagattttgtgacttgatggcgcatttgcaatgtttgaaacatcgccgggcggcgcaaatccaaatagcggtgttttaaccggacgtcttcagaaacctcagccgcctggtcactgatcggaaacggaggcgttttcgccgtactgagcaccgtcaccgcttcagctttgatttcaattttaccggttttcaggttggaattcaccgtgccttcttcacgggcagaaaccgtgccttcgatatcaagcacatattcgtttctgattgcttccgctgcggcaagggcttccttcgatacgtcagggttgaacacgacttgcacaatacccgagcggtcgcgcaaatcaatgaaaatcaagccgccgagatcgcgccgcttctgcacccaccctttcagtttgacggtttcgccaatcgctttttcagttatctcgccacaataatatgttcttccaaacatagcgttcctctccttcactgcttttgatctgcctttaacacttgtatcagctcgtctaacaccacttcacgctgttctcctgtttccgcatcttttacattgattttattttgggcaagctcatcttcccctaaaatcgcaataaaacgtgcgccgagacggtcagccgttttgaattggcccttcatctttttattttcataatcgatttcacttgagatgcccgcttctctcagtttgtacacgagggaaacggaataatccttcgctttttctccgagcgtcacgatgtagcagtcaatcccctgattgacgggaagctctgttttctcagcgtcaatggctgccagcagacgttcgatgctcatcgcaaatccgatacccggcgcttcaggtccgccgatctgttcaacaagcccgtcatagcggcccccgccggcaagggttgtaatcgctccgaatccttcggcattgctcataatttcaaaagcggtatggttataataatcaagccctctgacaaggttcggatctatttcgaacgggatgccgagatcgtttaagtattgttttactttctcaaaataagcggctgattcttcatttaagtaatcaagaatggacggagccgttttcatcagttcatgctctctgtctttcttgcagtcaagaattctgagcgggtttgtgtgcaggcgcgactggcagtctgagcaaaactctccgatgcgcggttcaaaatgtttgacgagcgcttcccggtaggatttgcggctctcctggtcaccaaggctgttcagcacaagcttgacatgtttcaaacccgctttacggtaaatactcatcgcaagcgcaatgacttctgcatccacggccggatctttggagccgatcgcttcgattccgaattgatagaattgccggaaacgccccgtctgcggacgttcgtaacggaacatcggtccgacataataaagcttcgtcggctgcaccgggttcgcaaataatttattttcattgaacgcgcggactgcagcggctgttccttccggccgaagcgtcaggcttctccctttacggtcttcaaacgtgtacatttctttctgcacgatatctgtagactcaccgacgcctcttgcgaacaattccgtatgctcgaaaatcggtgtgcggatttctttatattgataagtgcggcacgtctccctcataatttgttcgacgaactgccatctgtctgattcacccggcagtatgtcctgtgtgcctcttggaatgtgatatgccatgttacaggcctccttaatgtctttcttcaaataaaaaaactcccgctcctactatacatgtatagtagggacgagagttatacccgtggtgccaccctagttggaatgccgaagcatccccgctctgacctttaacgcaggttcacgtccgctgcctaatgacttgcaaaagcgttcagcagggaacctccggagtgttgtttcgagaaagatgcagtgcggatccgctttcagcccgggacggttcctctcttctccatgcattctgacctactcttctccattatcggttcaaaatcgttatcatgacttatgtacatcaatttctattataataatgggattgcactcccctgtcaagttttattccgtctgtttttccttgcgaccgcttctttcgataagagaccgaactccgtcgccgtctcttcaagaaaacccgccttttcgctatcgctctgatcactgaagtgcagatttccttccgcatcgtgcagcgcgcgtcccatttttggttgatatttcatgatttgcacaccttttcgctgtatttatgactagtataaacaaaccattttatttttatttaacattcagcaaggaaaatacgatattatacaagaatgtattttagttagttcagaaaggaggacagccatgaagaagagaactcttgctcttattttatgcggcgtcatcatcacagcgcttcttccgtcattccacaccgcaatcgccgcagagggagaagcggtcatcgcgacagacaagatcaatgtcagaggcggtcccggcctgagctacggaattaaggctgaagtaaaaaaaggggaaagatacccgatcgctaaggaagagggagactgggtgcagcttcagctgagccccggtaaaaccggatgggtcgtttcctggctgatatcaaaaacagccgggggagcagaccattcatccgcaacaagcggaacggtcacttccaccgatcctgacctccgcatcagaaaaggcccggggacatcgtatgaagtcatcggcaaacttccgcaaggcgcacatgcatccgtgctggacaagaacagcggatgggtgaacatttcttatcaaggcacaaccggatgggtttcttccgaatacgtcaccgcggacagcggcggatcggatacgaaagcaacttcggcccgaagcgggtcaaaaaacgggactgtcggcgtttcttcattgaatgtcagaagtgcagcgtcacatgattcagcgattatgactaaattatcacgcggaacaaaggtttccatcttaagtgaagaccacggctggctgaaaattgaagcaaacgggcaaaaaggctgggcagcaagccactacatcataaaggattctgactcatcggacagcgcatccggctcgggagacggttctgcgggctcaggctcctcgaaaaaagcgtatattgtttacggcggcaccaacttaaggagctcggcctcgacttccgcttctatcgtaaaaagagcagataaaggcgcagcctacccgattgtcggctcaagcggcaaatggtatgaagtccggcttgaaaacggacaaaccgcatatgtggcaaactgggtcgtacaaacgtcaaaaagcggtgaggaaacaggtgaagcaccttctcccgccacgtcaggcggcagcggctcacttaaaaacaagacgatcgtcgttgatcccggacacggaggaaaagacagcggaacgatcggctactccggaaagtttgaaaaaaacgtaaccattaaaaccgctaagttgctggcccaaaaattgcgggcggccggtgcaaacgtgtatatcaccagacaggatgatacttttatcagcctgcaggccagggtttcaacctctcattaccggaatgcggatgcctttatcagcattcactatgacagctatgccgatacgtcaacacggggaagcacagcttattattacagtccgtctaaggatcgccagcttgcctcagacgtccattctgaagtagtgaagcgttcctctatcccagatcgcggcgttctgtttggcgattattacgtcctgagggaaaataaacggcctgccatgctgtatgagctcggctatctcagtcaaccgcaagaagaaacaatcatacatagcggctcttatcaggaaaaagtgacagacggaattgaaagcggattggaacattattttcaatcataaaaaaaagctgccgaacggcagcttttttattgtttagaatccataatcaatgtaatcggcccggaattcgtcagctgaacatccatcatggctccgaatattccggtttccactttgactcctttttcccgaaggagttcgttccacttttcataaaggagcacagcctgatccggtttagccgcattcataaaattcgggcgtctccctttcttcgtttcgccgtaaagcgtaaactgggaaacggataaaatctccccgcccgtatccaaaagcgataaattcatcttgccgctttcatcatcaaaaatccgaagattcacgattttatccgccaagtaagcggcatcttcttctgtatcttcatgagtgatgccgacaagcgccataatgccgggtccgatccggccggcaacagcgccgtcaaccgtcacacttgcttctgttacacgctgaacaactaatttcatagcaagctccttttagttcattacccgccggactgaatagatgtctctgatctgtttaatccgctcgaccactttgtgcagatggttgatgttttgaataaaaatcgccatatgaatcgtagcaactttattgcggtcggatttgccggagacagaggagatgttggttttcgtttcatttacggcttggagcacctcatttaaaagcccgagacggtcataccccaaaatctcaatctcaacgttatattctttgcgtctttgaacctgtgattcatgctcccattcaacggggatcagacgttcctgcgcttcattcgttttgacgttcggacagtcatcccggtgaacggatacaccgcgcccttttgtaataaaaccgacaatatggtcgcccggcaccgggttgcagcatttcgacaagcggacgagaaggttgtcaatgccttttacgcgcacacccgcttcccgttttctcccttgcggataatgtttcggctcggaagtgacttcctgaacgattttttcctgctcttcctggtcacgaagcttccgttctttttcggtgagcctgttggccacctgaagagcggtaatgccgttatacccgaccgccgcgtacatatcctcttcatttgagaaattgaacttgtcggcaactttttgaagattttcgagtgttaaaacatctttcacttcaaaatcaagatttttaatttctttctcgacaagctcacggcctttttcgacgttttcttcacggcgctgtttcttaaagaattggcggattttgtgtttcgcctgagacgtctgcgccagtttaacccagtcttgactcggaccgtatgaatgcttggacgtcagaatctcgacgatgtcgcccgtccggagcttatggtcaagcgtcaccatttttccgttcactttcgccccgattgttttgttgccgatctccgagtggatcctgtaggaaaaatcaatcggcacagagcctgacggcagttcaatgacatcgccttttggcgtaaatacgtataccatgtcagaaaacagatcgattttcagcgattccataaattcttccgcatccgtagactcgttttggaattccagaatttcacggaaccaggacagttttttctcaaatgtcgcttcttcgtttgcagccttgccttctttatatgcccagtgtgcggccaccccgtattcagcgatctcatgcatctcaaacgttctgatctgcacttccagcggatcgcctttaggcccgattacggtcgtatgcagcgactgatacatattcggtttaggcattgcaatataatctttgaatctgcctggcatcggcttccagcacgtatgaataatgccgagtacggcgtagcagtctttaatgcttccgacaagaatacggacggcgagcagatcatatatttcattgaactgtttattttgcagcgccatcttgcggtaaatgctgtagatgtgcttcggacgtcctgagaagtccgctttgatatttacttcttcgacccgttttttcacttcattgacaacctcttcgacataaagttcgcgttccgcgcgctttttcttcatgaggttgacgattctgtaatattgctgaggattcaaataacggagagcggtgtcttccagctcccatttgattttagaaatcccgagccgatgggccagcggagcgaaaatttccagcgtctcatttgaaattctccgctgcttttcctgcggaagatgctttaacgtccgcatattgtgaaggcgatccgccagcttgatcaatatgactctgatatcctgagccatagcgacaaacatttttcgatggttttccgcctgctgctcctcttgagatttatacttaattttaccgagcttcgtcacgccgtcgacaagcatcgccacttcttcagaaaatgcttccttcaggtcgtcgagggtgacatccgtgtcctctaccacgtcatgcagaaatccgcccgcaattgtggaagggtccatttccagatcgacgaggatccccgccacctgaatcggatgaatgatgtacggctcacctgatttgcggtactgttcgcgatgcgcgttttgcgcatacaggtaagctttctcaacaaacgcaatctgctcctccggcagataagtgcgcgctttatctattacttgctcggcagtcaatacttgttcgttcgccatggaatcaccttttttaaatgtaaactgtattagtttattatcaagaaaaaaacgagagatgtaaagggcagaagttcaaaacacctaaagaatctgtcaggatgatgaaataataggaaaaaagcaccctgacacgagtgcttttttccatatgcggttaatatttcattaatgttaaaatatcgtaatcgtcaagcttgtctcttccgtcaaggtaagaaagctcgattaagaacgcaataccggctacgacgccgcccagttcttcgaccagcttaatcgttgcttcgatcgtgccgcctgttgcaagcaagtcatcagtaatcagcacgcgctgtcccggcagaatcgcatctttatgaatcgtcagtacgtcttttccgtactccaaaccgtaatcgactttaatgacctcacgcggaagttttccttctttccgaaccggcgcaaagcccactccgagagcgtatgcaaccggacagccgataataaagccgcgcgcttcaggcccgacaactaaatcaatttctttttcttttgcatattcaacaatttggtcagtggcgtaacggtatacgtcgcctttgtccatcaatgtcgtaatatctttaaattgtacgccttctttcgggtaatcgggcacaattgttacgtattttttaagatccatctgttctatgtcctcctcgtactttcataagcttctgaaccttggttcatcagcttattcagccattccttcagctcatgggctgcggaataattgagcttctggtctaattccatcagctgctgttttacctgataggtttgcgaatctgccaggtcgcgttttttcgcgccgctcacgacagacagcacaccatcttctattttaacaaaaccgagatcaaaaaacacctttgtcatgaaattgattgtgtcaattgaccatcctctgtgtctcgcaagctctgaaccatgcttgccgaagtcaaaagcgccccttttcaagagaaatgcgtaaaaccacttgaaatcattccgcgatggaaatgaggacaggaaatgttcttcatgattgataaaaacaaaataaatccggtccggcttctttccgtcaagcaaatgctgcaggcgatccgctgacggcggcacatccagaaaaacggcatattttccgtcaagctggagagcttccgcctcggattccgatgtgatcccggccagctcgcccgacagctcttttgcacggagcttctgagcggttttttcgttaaagctgatgagcacccgtttttccttcggcagcgcggtgaccgtgtcttcccacgtccgcttgcccctgatatcaaaaagctgccattccggcaccgcagcgtctttaatcatcagctggggcttctttctgttgttccattcattaatggacatctcgccgacaatggaaatcgttgatccggggacaattccggcttcaagctctcctttgttaaagccgacgcagtcaaggacggcggaatcacttttcaccgtcattttcacgtggtttttattcgctccgatcaggcgcacatcatcaagtacggcatttttcaccatcacatgcggtttagggttaagcatgccgaacggcgacagcatattcaattctgtaatgctttcaacggttatgtcttcaacgccgcagacaagatcaacctcctgaacgggaataaaatcctcttccgtaagggtttcttcagccatttgattcagcctgtcccttaattccgccacatcttcagccttcaacgtcattcctgccgccatcggatgcccgccgaaatgaggaagaatgtctctgcactgtgaaaggctcgtaaacaggttgaagcctctgatgcttcgcgccgaccctttagcgattccctgctcctcatctatcccaagcacaacagcgggacggtaaaaacgttcagccagcttcgatgcgacaataccgacgactcccggattccagccggcttttgccactacaatggcagacgggtttccgccttgctgctgaaccatttcaacagcctcttcggtcatggttttcaccattttctgccgctctttattcagccggtcaatatccgaagccagttcctccgcttcaaactgatcttcggtcatcagcagatggacggcgggatcggcctgttctattcttccgacggcattgagcctcggcgcgacctgaaatccgatcgtttcctcatcagcttgtccgatatctccgccggaaagcttaatcagggctttgaggcccggccgatttgtcgtccgaagcctttcgattccgagtgacgcaattaatctgttttcatcatgaagaggcaccagatctgcaaccgtaccgattgccgccaagtccagcatagcttccggcaaagaacccgtaagcgcgtgggcaagcttaaacgccacaccgacgccggccaattctttaaacggatagccgcagcccggctgcttcgggtggatgatcgcaaatacgtcaggaagctcgggtcccggctcatggtggtcggtaataatgacgtctaagcccagctcttttgcgacttcagcttcatggacggcggcgattcccgtatccactgtaatgatcagcgaaaatccccgctcttttatggagcggaaagcttgttcattcgggccgtagccttctgtgaaacggtcgggaatataaaagtcaacgtccgccgacagctgtctcagtgccgtcagcatcaccgacgtgcttgtaacgccgtctgcatcgtaatctccgtaaatcataatcggttccccttgagaaaccgccagttttatccgatcaactgcttcccgcattccctttaattcatacgggtcataaaagtctgcatcctttgtatgtaaaaacagccttgcgctttcggcagtatcaaaacctctttttacaagcagtgatgccacaagaggtgttatgtccaattgttctgtgagtgatttgactttttcctgatccggctgctggatttcccagcgcatttttgacgctaacataaattcacccctcaaccaccctattatactagagcggactgaggggtttcaaatgttattctgatccttttttctcttcaagcatttcttccggcggcgcggctgttttttggccgtccgaatcagccgtcaattcagccgcagatctgttttctttccgcagcattttaatttcgcgcttcagcttcatcacttgaaagataccggctgaaaacacgatcagcgctcccattaacacagaacctaaaatgactaaaatcagcggccattcagcggttccgaacagataatcaacctcaaccgcccgcacgttaatgacagcaaagatggcgacaatcaaagtaaatagtaaagcgaatataatagtccattgtttattcatgcgtctgcccccaattgttcattcttatcttttcccccattttcccgggagtaaaccccggtcttaggaaatccgggccgttaactgctcgcggaccagctttttcagtccgctcctttctcccgatatgacgagggtgtccccttcttcaattacggtatcaatgccggggctcagctgtttttgccggtttttctttacgatcgcaataatctgggcgttgtaatgtttcttgatctccaaatctccgattgtgcggctgacagccggtgcatgagattcggctttaaaccactcgatgacgaggtcatcaagcgcgacttccacagattccagcgctttcggcttatacgtcatcccgcctaaaatagcggaaatctgcctcgcctcttcgtcgttaaattcaacggatgccaggcattcgtcatgatcattctcatcgaagtaatagagctcttttctgccgtcatcatgaagaataatactgattttatcatgatttttcgtaatgacttctactttctggccgatgcccggaagctccgactcacgaacgttcataagaaccctcctacatgtttttacaatgatgattgattatgtaagcgtatgtcattatagcaaatgcaggttttaagttcaatgcggcctaaaaaaacaggctgccttccggaagacagcctgttcccattttactcttcgattgattttttccctttaaattctttacctttccatacaagccacagctgcgcggcgatgtaaagagaggaataaacgcccgtcaataaaccgaccaataaggcgacggagaagtttgtaattgacgatgagcccaaaatgagcagcacgacgacaacaatcacaacggtcaagaccgtattgatcgaacgtgtaaaggtttgctgcaagctcagattcacgatatgttccagatcggcaaatgacttcggcttacgttttttcatctgctcacgtatccggtcaaatgtaacgatcgtatcatttatcgagtaaccgattatggtgagaatagcggcgataaaggtgacatcgacctccagcctggtaatgctgaaaaacgcgacgataaagaaagcgtcatacagcagggatacaattgcggcgacagccattctgtactcgaaacggattgacacgtaaataatgatgccgattgatgcaatggcgacagcatataaagcattacgggccagttcttttccgactgtcggcgataccgtgctgacgttcggttcagatccgtatttgtccttaaagtacgttttgatttcagcgattttttctttagatggctctccgacaaaccgggccgcggcaacatggttctctttaccagaaagcacgatgttttccggttccatgccgagagagtcaaagtctttttcaacctgctgcgccgtcaatgcatgattgctctgcacgtcaatccgcgcaccgcttgcaaaatcgattcccaggttgagcttaaagaccagtaagatgataattcccgcaatggttacagcgcttgagaaaataaagaaatattttcgcttgctcgtgaaatcccatttttggaatgccgtatgcggttcagtattttcatccgttttttgaatgtccataatgtgttttttcttgacgccgaaccagccttttttccggtcaagccatctgctttccacgagaagggagagcaggaatcttgaaaggaagacagctgtaataaagcttgtcagaattgacagaatcagcatcgtcgcaaacccttttacagagcttgccccgaaaataaagagcacgaccgctgcgatgatcgttgtaatgttcgcatcgaaaatcgtcgcgaatgaccgtctgttccctgaacggaaagctgagcggacggatttgccgagtttcagttcttcttttatccgttcataggtgatgatgttggcgtcaaccgccatcccgacacccaaaatgagcgccgcaatacccggaagcgtcagcaccgcctgcatccagtcaaacacttgaagcgtaatatatacgtatacagaaagcgtaattaccgctatgagtccaggcagtctgtaataaagcagcataaataagaaaacaattgcaataccgatgatgccggcctctaccgtatcatgcaaagcctgctgtccgaattgcgcccctactgaagtagagtatttttcggtcagtttcacaggcagcgcgcccgcgtttaaaatattggccaagtccttcgctttttgaacggtgaactgaccttcaatcgtgacatccttcgtgtttaattcctggctcacattcggagcggatacatatttcggatgttttttgccgacttcttttttaaatgaatcgcctttttggtaatcaagccagatcacaagctgattattaggcgccattttcttgacttttttcgtcacttctccgaacttatccgcatccttcagcttaacgctgacaatcggttcgttcgtcgtcggatcaaaggtttgcttcgcgccgttttccacgagatcagagccgtttaacagctctttatcattcgtatccctgaacgagagctgcgcttccgttgacagaatttcgcgcgccctgttctgattcgtgacgcccgccagctgtacgcggatgcggttatttccttcaatctgaatattcggctcgcttacgccgagaacgttagcccggcggttcagcgcctgcaccgtgctgacgagcacgtcttttgtgattttatcgccttttttgacgggctgcacatcgtacagaacttcaaacccgccgcgtaaatccaatcctaacgtaatattattggcagccggttttgtaaaataccccagccctgtgccgatcaataatacgatcaggaaaaacgcaatcaagcgtcctttattcattatgtatttcctccttaaacctatgccgtcaaatcattatctcaacagttcatccaaagcttgctgaccctcatcgctttccagccaattagacgacttaaaagcttcaacggttgcatagttcataaaatcgccaatttttactgataaaatatgaccggccaattcatgcagcggcagttcctttttctgtttccactttttatgtattaagtatgaccataaactctcgtgctcaacatcatcgtatccgaggattttgaactcttcaagtttactgtacaagaaaggccgcaaatgatctttgtacatttcggcgggatgtttctccactgggcgctcgctcctttttccatttttctcgaagacttgtcatgctcggacgacatcggcgcatatctttattgtatatgattccaggtagtttgagaaggcaggggtttataaaatggcaaaacagacttttttaaggggcactcttattctcatcgcagccgggatgattacgagaatgctcggctttgtcaaccgggtggttatcgcccggtttatcggtgaagaaggggtcggtttatacatgatggctgccccgacatttttcttggccaccactttgactcaattcggcctccccgttgccatcagcaaacttgtcgctgaagcaagcgcgcggggggaccggcagaaaatgaaacacattttagtgatgtcgcttaccgtaaccgggatattaagtctcatcttcacgccgctgtttttatgctttgcgccgattatgtccgaaacgatgctgacggatcagcgcacggtttacccgcttctggcgattacgcccgtcgtgccgattatcgcgatctccagcgtgctgcgcggttactttcagggcaggcagaatatgaacccgctggcgttttcccaagtacttgagcagatcgtgcggatttcacttgtcgcggtctgcacgacggtgtttctgccgtacgggattgaatatgccgcagcaggagccatgatttcgtctgtcatcggggagcttgcctctcttatttatttattcatttgttttaaagcaaataaaacaatcagaatcagaaaacaatttttcaagtcgatcgcaaatggaaaagaaaccttccgccagctgatgagcgtgtcgctcccgacaaccggaagccgcttcatcggaaatttatcttggttttttgaacctattgtcgtcgcgcaaagccttgcgattgcaggagtggccaccgctgccgccaccagccagtacggagagctgaccggatttgccatgacggttttgacgctgcccagctttataacctattctctgtcaacggcgcttgttcctgcgatcagtgaaggaatggagcaaaaaaagctgcaagttgtcgaataccgtctggaacaggcgatgcggctgtgtcttttaagcggaggcatttcggtggttattttattctctttcgctgatgaactgatgtccgtcatgtacggatcaactaatgcggcggtatttgttaaagtgatggcgccgttttttctgctttattattttcaggggccccttcaggcggtgctgcaggctctcaatttagccggggccgccatgatgaacagttttatcggcgccgctgtcaaaactggcctaatttttgttttggcgaccaggccttccttgggcatcatgggcgccgcacttgcgattgtaacggggatggttcttgtcaccctgctgcatgcggccaccgtaagcaaggtgcttccgatcagcattaaaataaaagaatacgcgctctgttttgccgtcatattcatttgcggctatgtcagccgcatcatcaaacacgccgttcatttttcagggtcagaggctgttaatctcacaggctggattgcaatgaccgcgattttgtacattgcgcttcttctgttattcaggctgattaaaagggaagagctgatccggattccggtcatcggcaagttcgtgacgcggtgaaaccgattcatggctcccctttttcatctttaagatcaataaaaaaagcgccgtccgtaaacgtgcagaatgatataaccgaaagatcgcgatatcctctttttgctaaatttttttcgagccagtgtttatctttcccgattctgtccagatgctcgttctgaatgaccccgtcaacgataagcgatgtttccatctgcttatccttattgtttttctttttgacgatcgacagtttgcctgaagactccaaaatggcatatgacacgtcagagattctatcgatgttattctccctcagctgcataagaagatcgtcaaaattgtagcgctgcgatctcatcgcccgttcatcaatttttccctgttttataataatggtgggttttccgtcaagcagctgccgtattttttggcttttgagcgaaataaaagcaaggcttacttgaataatcattaaaacgacaatcggcacaattgtatgcaaaagcttatcttttacattttcaattgccaatacggcaatctcggcaatcataatggagacgacaaggtctaaaatgctcagttctccgatttcccgttttcccatcagtctgaaaatcacaagaatgataaaataaagcacaatcgtacgaaacgtaataatgaaaatatcttccatatcgcacctccaacggtcatagcatttgccatcggctctgaattatgtaagaaacgggctgaacatcatgcatttacgtctaattcgaacattcagagaatacatttagaaaaagacgggctccggcttgtcatatatcaggccgcagggcggagaggagataaaaatggaagaaacgaaacaagtgggaagaggcgtcttgtacggcttagtggctatctttgcggtgatgcttcttacgagtttggcgatttcgcttttactgacagttacctcaatggaagaatcatctttcagctggctgatcaccgcgctttcttttctttctttatttgcgggaggttttatatcgggcggcaaagcgaaggaaaaaggctggatgatcggagcgttaaccgccgtctgtttttcattaatcatcttgctgtttcaatatttagggttcggaaaaacgtttacatccggtcagcttttgtttcatctcggctttttgggagtcagtatgctgggcggcattttcggagtgaatttgaaaggaagcagatcagcgtaataaaaaaagagcggattctccgctctttttttgtatgtatgagcttcgctgttattcagcggaagcttctctaattgcgcggcggtcaaatgttaaacgggtgttatcacctgttttaatgacgaccttgctttcatcaattgaatcaacagtgccgtgcaatcctccgattgtcaccactgaatccccttttttcagctcttcctgcatctggcgtacggccttctgctgcttttgctgcggacggatgagcaggaaataaagcactgcaaacattaaaataataggaacgattgtacctaaagtacccatctgtttccctcccttcaagaatggttttatttagaagcttttcgcatttggcttattatagccgtaacgctcaaagaactcttctcggaaatcaccaagacgatcctcccggatggcttgtctgacctgctccattaagtgtaacagaaaatgaaggttatggtaagttgttaatcgaattccaaacgtttcattacagcggatcaaatgtctgatgtaagcgcgggagtaatttttgcatgtatggcagctgcactcttcatcaatcggacggaaatcacgctcatatttggcgtttttcatattcagacgcccttcattcgtaaacaccgtgccgtttcgggcaatccgggtcggcagtacgcagtcaaacatatccacgccgcgaatggcgccgtcaattaaggcatccggtgaacccacacccattaaatatctcggcttgtccttcggtaaaagcggagttgtaaactcaagcactcggttcatgacgtgcttcggctcgccgacagataatccgcctatggcataccccggaaaatcaagcgaaaccaagtcttttgcactttgtgtccgcaggtcttcgtattctccgccctgtacgattccgaacagcccctgctcatctgagcgcccgtgcgcctccaggcagcgttccgcccagcggctggtccgttccacagagcgtttcatgtaatcatactctgccggatacggcggacactcatcaaacgccatcatgatatcagagccgagggcgttttgaatttccatcgctttttccggagataaaaacagcttgtctccgtttaagtgattgcggaaatgaacgccttcttcttctatattacgaaacttgctcaatgaaaagacctgaaaaccgccggaatccgttaaaatcgcgcggtcccagttcataaacttatgaagcccgcccgcttcttttacaatgtcgtgtcccgggcggagccataaatggtacgtattgcttaaaataatgcccgcatccatagatttcagctcgtccggagacatcgtctttaccgtagcaagcgtgccgaccggcataaatacaggcgtctcaaaggagccgtggggcgtatgaactctgcccagtcgcgctcccgtttgtttgcattcctttataaattcataacgtatcggttgttcagccactttgtatgaggcctcctgtcattcaaattagataatcagcatggcgtcgccaaagctgaagaaacgatattcctcttctaccgcatgacggtaggcggaaagaacatgctctctgccggcaagcgcagaaacgagcatgataagggaagatttcggcagatgaaaattggtgatcatcccgtcaatcgccttaaattcatatcccggataaatgaagatggacgtccagccgcttgaagcggtaaatacgccgtcatgctcgccggcaatggtttccagggtgcgcgttgatgtcgtcccgaccgacacaatgcgccctcccgcctttctgacctcgtttaaagaggcggcggtttcttccgtcatttcataaaattccgcgtgcatgttatgctcttccacatcatccgcactgaccgggcggaatgtgccgagtcccacatgaagtgtgataaattcaatccgcacacctttttgcttcagctcgtccagaatctcttccgtaaaatgaagtccggccgtcggagctgcggcagatccgatttcttttgaaaagacggtctgataccgttctttatcatcaagctgctctttaatataaggaggcagcggcatttcaccgagtgattcaagcacttcgtaaaaaatcccgtcataccggaattctatttttctgcctccatgatcaagctcctccgtgcagaccgctgtcagccggccgtcgccaaatgtcaggaccgttcctttttttacgcgtttcgccggctttacgagcgtttcccatgtatcattttcttcctgttttaataacagaagctccactttcgctcctgtatcttcttttgtgccgaataatcttgcaggcagcacacgggtattgttcaagacgaggcaatcccctgcattaaaaaagcttacaatctctttaaatgaactgtccgtcagcccgcccgtctgtttgtcgagcaccatcagccgcgatgcgtcacgctctttaagcggcacttgggcaatgaggcgttcaggcagttcaaaatcaaataaatcgactttcatcatttcaccttaattctgtctattgttatttcattctgccgaaaaaattaagcagaatggatagtatcacactgatcacaatacaagtgacaacgggaaagaaaaatgtaacatttcccttcttaacgaaaatatctccgggcagccttccgacaaagtgccagactgcgccggcaataagcaaaacggcaccgagaaccatgagaaccttcggaaagtcagtcacgggcgggcgcctccaatcgaaaatgttcatacacagccggcgtcacgacccgtcccctcggcgtcctctgaagaaatccgatctgcagcagatacggttcgtacacatcctctattgtatgcggttcttcgccgattgtcgcggaaatcgtatcaaggccgacgggaccgccgctgaatttttcgatcatgcccatcagcagcttatggtcgatatggtcaaggccgagcgcatcgacttgaagacgttcgagcgcgtcgtgagcgatttcttccgtgatgcggctgtcgccgagcacctgggcaaaatctctcacccttctgagcagacggtttgcaacccgcggcgttccccttgaccgtctggcgatttccagagccggtgctttttcgatatccacttcaaaaacgtcagccgttcttgacacgatatctgtcagctcttcctgcgtatagtattcaaggcgcgacagcaccccgaaccggtctctgagcggtgcggtcaataatccgacccttgtcgtcgctcctacaagcgtaaaagggggaaggtcgagacggacggagcgggcggacgggccttttccaatgacgatatcaaggcagaaatcctccatcgccgggtacagcacttcctcaattgagcggttcagcctgtgaatttcgtctataaacagcacatcccctggttcgagcgccgtcaaaatggctgccaaatcccccggtctttcgatggcgggacctgacgtcgtccgcatctccacacccatctcattggccacgatagacgcaagcgttgttttcccgagacccggaggcccgtataaaagaacgtggtccagcgtttcctgcctcattttcgccgcatcgataaacacgcgcagattttctttcactttcttttggccgatatactgggcgagattctgcggcctgaggctttgctcgattattgattcatggctgtctgcttcacttgaaacgagccgttcatccatgaacatcaccttactttaataatttttgcaatgcttttttcacatattgatctgttgaaagcgccgtttcctcttttaagtgaggaagcacttttttaatttctttttcggcgtagccgagaacccggagcgcttcaagcgcctcgtcaagcgccgtttcagcctcttgtttttcaatgcgcgcttcatgattgaacaggttgtcaatcatttcaggcacgacgtcggcaagtttgcctttcaaatcaagaataatctgccgcgccgtttttttgcccacacccggaaatttcaccaaaaaggcttcatcttcctgttcgatcgcttcgatgacggctccgggatcaccggaaccgaggatggcgagcgcccctttaggcccgatgccggtgacgttcagcagctttgtgaaaagcgctttttcttcccgggttgaaaaaccgtacaaagaaaaggcgtcttcttttatatgatgatacgtaaaaatggtctcttgattgcttaccttataaataaacggattcggagtgaagacctgatagccgattccgccgttttcaatcacgatgtattggggagatacataatcaatcgtccccttcacgaattcaatcacacctattcacctctttgactgcttatcattgtaacacaaaaacagccaaagtcttatagaaaagttaacgtatgttcgctctggcaccttccattcagaaaaaaaagacatgtgtcacatgtcttgcgtcaaagtcagccgctgtaagtcttaatatgatcgatcacgctctcaaactccgcttttgtcctgtacggtatgccgtgttccaagtgcttttgcaatcggctttccagcctttctatatcaatctggaagaaagattgaatcggctcggccagcgatccgggacggccgtgaaaagtggagatgacgcctccgtccgtgacgccgatataaccgttaaccttactgagcggagaaatgtcatcaacatgcttacggaaaaggacgaagccttttttctgctcaacgagcgtccagccggcatatgaggcccaaaaatcctccatcgccaaaacggtttcatccgtatgttcgatgccgacatcaccgtccagatagaccttttccagctggacgtgcacccgaagcggcccgtaatgctcaacctccgccccgtatgcgccttttcctccgcaaatcaggactgcagccgataagacaagcataaacaatagacgagcaccgcaaattcgtttcaccaataacacctctttattcaatcaaactcttgatgctagtttgaccaaagatgccgatgcttaatcgttttctttcatttgtctgtttcagccgaaaaaaagcagctctctaaatgagggctgctgcgatgattatgccctgccggctgaaatcagtttcatttgtccgggcgtcagtttgagccggtatccccttacggtcagatacacagtttttgctccgcggcttttgtcatgctccgtttttttcatcccggcccctccgttacgttttattacttttatgttaacaccgcaatataaagagcgttttaagaatatgtaaagaaatgatgaagctttatccataaaaatactgccggatgaaatcatccggcagtcccgtttaacggctgtttctgttcatgtcttgcagctttgtaaaagtagcgttgtcggtaaacacttgaattgtacggccgtccgcgaattttttggccgcatgtttgacatgtttatcatcattcttcgtaaaaggatgatttgttctgacggcaatgacgactctcgtgtcagtcacgatgacctgactatcctgtacgccttttacttttttcacgcggtttgcaacttttgccgccaacctgatgttttcggcgttgtcatacccattataagacattgctgccggcggcgtattgacatttcggccgttatatgtgccgtccgtcgttaacggaacaccgtcattaggcgcatactgatcggacacgtttgtcgtattatgacggccgtttcggttttccatcatttcagaaacgggtccttgatggtccattccgtactggcctctgccgttaccattatcattcgaataatatccgaccggacgtgttgactggttgtagcgtccgtcattcatggcattatttgctccgcatgccgttaagcttgccgtcacggctaaaacgcccgcgatcgtcatcagttttttacccaatggaaaaacccccccgtggattcatcgctgttttgagcgttttccgctcatgtttaggatgcgcggcgggcggcgggtttaagcttgtcagttatgtccattcctcagttggacataaaaaaaggaacgacatacatcgtcccgaaacattaatcttcttcttcctccggccgtccgaatacttgatttggactcggctgattcggcgcggcattaggatttgctccgccgtaaggcataaaatatccggcgtttgcacccatattcggatacggctgcacaggcatatttgcgtgatggtgatgtgaaccgtggtgatggtggtggtgatgatgtgaatcatggcagccgcaatcatcatccttatattttccatcatgatgaggcgcgtttgcgtaatgtgacgaatatccgccgtaatacggcatttgaccgtacggagcaccgccgaaaccagatgcagaaccatcataatgctctgcattttcatgggcctggttttcatattcaccgtaacccgcatgcggcccaaatcccggatgatggaatccgtacggtaacggcatcggcatgaccggaaagcctccaaaacctcctccaaaaccgccgaaacctccgcctaccgggaagcacggatggcatagtcccgaacccggcagcatcggtgtcaccggaaccggacaaggacaaggcatgcacggcatcgggtaatgcataaaaggcggttcaacggccggcatattcggaaacgggaaattcggaatgtttggcatgttcggcagatgataagcggcgttttcttcttccatctttccggcttcaggcgcctttggcatattcgggtaattcgcgttttccatgttgatcatttcctcctgttgtggaatgttattgtcatgctctttttctttcggctcgacaaaatgtgtcaccggttcctccggcttaggaggcgaccacggctgaaacagctgattggacgggtaatattggttcatatcagcttccggcagcacattttcatgcttttcagggattggcggcacatacggaatcgacggctttggttcttccggtatggtgtcttcaatgtccacaactgatttcggtttttctttggcatatggatgctcatgcttatgcgcagacgttccgaagccggccttaggttcttttctgaccggaacggcttctgaaggcacctttatcttcattccaggcataattaagtctggattgctaagctgatgattcagtttttttaactcttcaagatcaactccgtatttttcagctattttccagagcgaatcgcctttttgaacgatatgaattttcaacgttttcccctcctatgcacaaaacgtgaacggtacatttgtcattacaatacgtttcttcacactatatgccgatggactgggcatgatgataaaaaatttgggaaggaggggaaatttttataattacgtatgactcagcattctgttcaaagcacgaagcgcttctgtccgaaccgcttccggaactttaatgacacccttcggctcgcctttttcaagctgctcaagcgaccacaataaatgcggcaggtcgattctgttcatagtcagacacggacacatatcgggattcaatgattcaatctgtttatccggatgcgagtgaatgaggcgctgaacaagattcatttccgtgccgatcgcccatttgcttcccggttcagcctgttcgatcgtatcaataatgtatttggtagacccgctgtcgtcactgagcgagaccacttcccgcgaacattccggatgaacgataatgcggatgccggaatcccgctgccgcagctgagaaatattttccgctgtaaacttttcgtgtacggagcaatgccctttccaaaggataaccttaatgttttccggatggtcagtaagcaatcggttctgcaccgggtcccatacagccatttctgtcagcggaatgccgaggtcataggccgtatttctgcctaaatgctgatccggcaaaaataaaattctctctttttgtttaaaagcccatttcagcacactccgggcatttgaagaggtgacggtcgctcccccgtgccgtccgacaaatgctttaatttccgccgtcgagttaacatatgttaacggaatgatggtgttaccgtacagttcttgaagctcttgccatgctttgtccgtctgctgaatatctgccatatcagccattgagcatccggcgcgcatgtcgggcaaaatgacggtttggttatcatcagtcagcatatcagcggtttccgccataaaatgcacgccgcaaaacacaatatattccgcctctttatttttttctgccacttgagcgagctgcagggagtcacctgccgtatcggcgaattgtattacttcgtctttttgatagtgatgccccggaatgaacaggcgctttccgaaagcccgtttaatggcggcgacccgcttttccatttctcctgtgctcatgtctttataatggctcggcatcatttcggatgatgcagttagcacgtcaaaaatagacatcttaaaaatccccctgttccgcagcctcaacatccatgctgatgtcggcgctttttactgaatgagtcagaaatccgagtgaaatatattggacgcccgttcctttataagcgggcaatgtgccgagcgttatgcctccggatgcttccgttttgatatggcccggtgtcatgcctgcaaaacgccggacggactcaggcggacagttgtcaaacataataacgtctgcacccgcttctattgcctcgagcagctgctgttcggattcgatttcgacttccaccgcaagcatctgccccgccgtttttcttgcccgctccatggccgcccttatcgatccgcaggcagcaatatgattatcttttatcatgatgccgtcatataagccgaagcgatgattaaagccgcctccgacccgaatggcgtatttttccagcattctgagcccgggtgtcgtttttctcgtatcacaaagcttgatggacggatcatcaagacgccttttggcctcatccgtcattgtcgcaatgcctgacattctttgtatgagattcagaatgacccgctcccccgtaagaagagccgccgcctggccttccatttcagcgagcacgtctccttttttcatccgttctccgtcttttttcagggagcggatgcggatgtcatcgtgtaaaagcttccatccttcacggataacggcttctccggcaaacacgccgtctgtttttgcgatgattcgcgctttacattgctgatcagaaaaaatcgcttgtgacgtcgcatcacccgtcccgatatcttcctgaaaaaaatgagtcagcatttgtttcagctgcagaatgtccatagttccccaatcctttcgttttttctgatagctgttccagatgttgaatgaatgatttgttttccgtgccactctttctccgtcccgggaaaatcagcgcgaaaatgagcgcccctgctttcttcccgaataagagctgaggtcacaacaagttgcgcagtcttccataagcaggatagctcggcttgttctattgtgatatccttcacatttatatgacgcacagatacgttgttaagccaggatgccagcgcctgcatgttttctttttccctgacaatgcccgctccggttgtcattttggcttggagcacatgaagcgttgtgtccggcacttgtaagatgacgtcagatttcttcggggtttttttatatcttccgtttaacggcgtttgaatgatatgttcagcacatcgtttcccgcttgccagcgcttccagcagtgagttgctcgcaaggcggttcgccccgtgcaatcctgtgcaggaggtctcgcctatggcgtacaaatcaggcacggacgttttcccccaggtatcggcttttactccgcccattaaaaaatgcattccgggtgctacgggaatcccgctttcaagatcaacaccggctgtttgacaaatacctgttatggtcggaaaacgtttcttaaaatcggctattcggctgcaatttataaaaacaggattttctttcatcgtttcttcataaatcgcccgtgaaaccacatcccggggcgccaaatcttcaagcgcgtgtctgccagccatgatcctgcgcccgaagcgatccgctaaatatccgccttctcctctcactgcttcagaaatcaggccgtacatagtcccgtttttcacaaggagggtcgggtggaactgggtgaactccatatccgtgatctcagctcccgcgcggaaggcaagagcgatgccgtctcccgttatggcggaatcatttgtgtgatattggtacagactgccgcagccgcctgatgcaagcactacacaatccgctcttctgtaagaaacggcgcctgaagcatcctttacggcaacacctgcgcatcgtccctgttcaatcagcagatcaacaaccgtctcgtgttcaatgatccgtatgccgtccctcagctgctgaaccagaaactcaaccaacatccgtccggtcgcatctcccccggcgtgcagaattctccttttggaatgagcgccttccctgccgagacaaaacgttccgtccgacttcgtatcaaaagggaaatggccttctatcagcctgtttatcatgctctgtccgctttgcagcaaatgccgcacggctgtcacgtcattgtgtccgcatcccgcatacagtgtatcgttcacatgggattctatcgagtcatcttttgcgtatgaaacagcaatcccgccttgagcataatgcgaattgctgttcgttacgtttctctttgtgatgacggtcacttggtatgacggaggaaatgaggaagcacaggcaagggccgccgtcccagaaccaatgacgataattgttttttcagacatacatcaccctcctgttatatttacacctgtcttgacacctatatttacacaacagtaaaataaactcaagctttttttaacataaacggataggagacgggctgtatgatttatcttgattacgcggcgggagcgcctttaagcaaagaagccgcgaaagtctttcagcatctcagcacagaggtatacggcaatgcaagcagccttcatgacgccggaggaagagcggcggacgtgctggaatattgcagacattctgcaggcaaattgatcggcggagcggcagacggcatttactttacaagcggcggaacggaagcgaacatcctggccgtccaatcattgctgcacggcctgcccgatcacaaaaaacattttattacgaccgcaatggaacaccattcgatccataatgccgcggcgtttttagctgatcggggaattgatgtcaccatcatatatcccgacgaaaacggccttataaccgaggacatactggcggctcatatccgtcctgacacggggctcgtttccatacagcacgccaattcagaaaccggcctcatccagcctgtgaatcgtctggccgcttttcttcaccagagaaacattttgctgcattgcgattgtgttcaaagtttcggcaaactgccgattgatgcggatcaggagggaatcgacgccctttccgtctccggtcataaagtatacggcccgaaaggcaccggggctgtttacattcggcccggtgtcagctggaacccggtttatccgcataccgtgcatgaaaacgggttcaggcccggtacggtgaatgtgccggccatcggcgcttttaccgctgctgcggagtatgcagtgaaacatatggaggaacaccgtgagcatgctgacaggctgaggaattatttgtatgaccaaattcggcgtcaaggcctccccatttcattttcagaggaagaaaccggcggtgaatgcctgccccacattgtcgggtgtttttttcactcctttgaaggacaatatattatgttagaatgtaatcgtaacgatatttgcatctcaaccgggagcgcatgttccgccggcagccacggcccttcttcagctatgaaggcgctgggaaaaaacgaacgggaagcgcggcagtttttccggatctcattcggaaacgaaacaacatgtgaacagctcgatatgctgatacatacatttacggcgctatgggagcaaaagaaaggagaatcagcaatttgacagaaggaacgaagcttactggggagaaaagacgcgacatgctgcttcattggctgaaagaagccggctcgccattaacaggaggcgaattggccaaaaaagcaaatgtctcaagacaggtgatcgtgcaggacatatcgcttttgaaagcaaaaaacgagccgattatcgcgacgagccaaggctacttatacatcagcatgaatgccggcggcgaaaaaaatgccgaacggattgtcgcctgtctgcacggcccggagcggacggaagaagagcttgaactcattgtcgatgaaggtgtcaccataaaggacgtcattattgaacaccccgtatacggcgatttaaccgccgccataagagtcagtacacggaaagaagtcaaacaattcatggatcacattaactcgacaaatgccgcttacctttcacagctgaccggaggcgtgcacctccatacgttaagcgccccgacaaaagagcggattgtccaagcctgccaagcgctggacgacgcgggtattttaataaaagattaaaaaaaaagccccctgaagggctttttttatatcgaataggattgatatgttcccagaagcttgacccggcagccgagggcttccatctcttgaacggcaccgggaatgagaacctgatccatcgcctgttcaatatcaataataaagaaatagttgccgagacccgtttttgtcgggcgcgattcgatctttgataaattcaggtttctccatgaaaaagcggacagcaccctgtgcagcgcacctgattggtcatcttggggaagcgttaccatcatcgtcgttttcggccgtgaagacagtttcgcattcacttcgaatgagacgtctttttcaggcgaaagaatgacaaatctcgtgtggttgtcctgataatcctgaatatcccgcttcacgatgctcaatccgtatgtagcggcggccatttcatttgcaatcacgccgatcggaaggtccgaatgctcactgacatacttggcagccgcacctgttgacttcgcatactcataaggaacggacgaaaaatgccggtgaagaaatttgtggcattgcgcaatcgcatgggaatgagaataaattttctcaagctttttccactcattttctctcgaagggtgaacgagcagatgctggtgaatcggcagcgtcatttcccccacgatcgcaagaggctgctcatgaatcaaatagtcaatcgttaagttaaccgagccttccagcgcgttttccaaaggaacaaatgcaagatcaacttctcccgcaaccgccgcatccatgcatgccggtattgtttgataaggtgcttgtgtcacgctgttttgaaagcaggaactgactgctagatgtgtaaatgtggcttctggccctaaataaccgactttcatgtctcttctctccttacgcgcctgaccctaagatctcaactttttctataaaatcaaattttctcagtttattcattaacgtatgaatgttttcttccattgcggacgtactgattgagagcgtgacattcgccctgccctgaagcggaatcgtctggtgaatggaaagcacgttgcttcctgagtcagccaccgcctgcaatagctgggataacgcgcctgaccgatcctccaaatgaaagaaaagtgtgattatttgttctttaaccatcgtgtaaaaagggaaaaccgcatctcggtatttgtaaaaagcgcttctgcttaaatcaactttctgcacagcatctgcaaccgattcagccttttttctgtccagcagctttttgacttcaagggttttccgcatcgcatcaggcagaacgtcttcacgcactaaataaaatgtctcttctttcacctgccacccctcccttttacatcagagagcctgcaacgcaagctctccgtttttttaatcaataaattcaaattcaaattccagaagccggatgatatcgccgtctttagcaccgcgttctctgagcgcttcatcaacgcccataccgcgcatctgtcttgcaaaacgcttgacggattcgtcacgggagaaatcagtcattttaaagaggcgttccaggctgtcacctgaaagcacaaacgcgccgtccggatcacgggtaatgttaaatggaatttcttcatcttccatcgtgtacattacgcggttttccgccagttcttcttcatcatacagcgggaattcaggcgttgtttccagctggttggcgacttcaaacagaagatcgcggagcccttctctcgtcacagcgctgatcgggaagacaggatggtcatcctgaagcttttctttaaacgctttaagattttcagccgcttcgggcatgtccattttattcgcaacgataatttgcggacgctccgtcagccgcagattatattcactgagctcctgattaatggtcacataatcctcatacggatcacggccttccatcgctgacatgtcaatgacgtgaacgatgacgcgcgtccgttcgatatggcggagaaattggtggcctaagccgactccttcatgcgctccttcaatcaggccgggcagatccgccatgacgaagcttcttccgtcatccgtttccaccatgcccagattcggaacaagcgttgtaaaatgataatcggcgattttcggctttgccgatgaaacgacagacagaagcgtagattttccgacgctcgggaagccgacgaggcctacgtctgcaagcactttcagttcaagcacgatatagcgctcttttccgggctctccgtgctctgacagctgcggtgccgggttggccggtgtcgcaaagcgggtatttccgcgtccgccgcgtccgccttttgcgatgacggcacgctgcccgtgctcagtcagatcggcaatgacctgttttgtatcgtcatccgttacgactgtgccgggcggaactttaacaaccatatcgtccgcatttctgccgtgctggtttttagacatgccgtgctcgccgcgtatcgctttgaaatgccgctggtaccggaagtccatgagcgtgcgcagtccttcatcaacctcaaaaacgacgtcgcctccattacctccgtcaccgccggcaggcccgcctttcggcacatatttttcacggcggaacgcaaccattccgttaccgccgtcgccgccttttacatatactttcacctgatctacaaacataatatcctccgttctaaaccgtaaaaaaccgctagttcattccaatttcggccacacattcatggccggtcagctcaaattgcatgacatcaaagtcctcatgccgggatttgcgaaattcatcaaacacatctgcatttgcaatcgttccatgaaaatcgagatatacaataagctgtctgtcagggtgatccgtctgcagcgatacggtcagatgattttcactttcattgtttaccgccagaccgaacagatgaaacagttttctcatcaggttcgacagcttttgatcatatgccgataaatctttaatttctccgagcacttcgtattcgagcctcatataacgggacttccaattaaatgtaagaaagtcaaacgccaagtgcggggttttcaggtttgagagctttgattcgtgctttgcatctatgaccatttcgtcaataatttcaacgaccctgtcatacttctgcaaacttaagtttccttttatcagctgcagcttattcatccaatcatgacggaaatggcccattaattggatcagctcattgatcagagccgcatcgcttacaggttcttcttgtttcttcgatacatccttcattttcgcactcccaatcgtttaatttctttttaggagtcttgataagtgtgtactatgaattataacagagaaggctttgttaaaaaaacacttgtttttcctggttcatcatgttcctttttcggatcgcatacaatgcggatgccaggcagaaacatttttggtatcactgcttggggaacatatccagtgggtatgggaagctgatgtcctcattcaaggcggggttcactcacgcatcctctgcttttcattcttgatgttactccgcttactgcaaaaaaaactccagtcaacgaccggagttttttgtgtcattattgagctacaggatatacgctcacttttttgcggtcacggccgaaacgttcgaatttaacagttccgtcgattttagcaaaaagagtgtcatctcctccgcggcccacgttttcacctgggtagattttcgttccgcgttgacggtaaaggatagatccgcctgttacgaattgaccgtctgcacgtttagcgcctaaacgtttagattcagagtcacgtccgttctttgtagaacctacaccttttttagaagcgaaaaactgaagatctaatctaagcatgtaactcacctcctatatttggtttgcagtcaaccgtaagtgttcactgtaatcccgctcgatcgtttcaagagaaacaatcatgccttcaatcagcagctgcgctttttgcaaagcttcctgatcagcggcttcagggaattcaaagtagaaataacccccgtcctcgcctatatcaagaatcggttcgagaggagccagcgcgataaccgcattgaccgctccgaaaacgacagccgtgaccccggcgcatacgagatctcgtccatgttcagcaaaatcggcatgtcccgtcatttcaaaggacaatatgcccccgtcattccgggatcttcgaattgttgcctcaatcatgcttacgcgttgattttttcgattgtcaatttagtataaggctgacgatgaccttgttttttatgaacatttttctttggcttgtaacggaaaacagtgatttttttcgcacggccttgtttttcaactttagctgtaactgtcgcgcctgcaactgttgggttgccgactttcacgctgtctccgccaacaaacaatacgtcttcaaacgtcactgtttcacctgcttcagcagcaagtttttcgatgtaaacagtttgaccttcttcaactttgatttgttttccgcctgttttaatgattgcgtacattctctgcacctcctattagactaagactcgccagcaacagggggctttaaagctcttatcacctgtcccgagcggttgtagcattggtgctacatccataacattaaaaaatatatcagaaccaaaaggatatgtcaatctatttctagtaaggcagcagcaggtcttccatagaggaatctgtccgtttatcggcaaaatacgcatgaagcacttcattttcatcgagctggctgagcttttcgccggctttttcaacgataatggggtgcttgcatccccgtttgaattcggccatgacatgctttactttggcatcggccgcgaccgtcaaaggatgcagcatggcgacatcgcggtttttgccgtagtatctctccaaaagaaacctcagctgaatataatgccgcttccggtattcatcccataaagaagcggcgagaaagacgaacagcacccatgcgctgacctgaagggggacggccagcacaatccagcagcagagcaaaagcgcggaaacagccgatgtctgcaggctgaggagatgcgctttttgaaaagccatttgtttagagaagtataaaaacacgaactttccgccgtcaagcggccagatcggcaaaagattgatgaaaagaatggagagattataaaaggtaaacatctcaaatgtctgctcacttgcaaagcctgacatgaaaaagagccaggctgccgcctgaagccacacatgctgaagcgggcccgccagaatgaccgcgaattcctctttaagcggccggtttccgtgctcctccacctcaaccgtcccgccgaaagggagcagaaagatgcgtttaatgcgccacgaaaaaaacacagccagagcagcatgccccagctcatgaacggatacgaccagcaaaagacacagcagcgctttgatgtgccccgtcataagaccaagccccatgataatccaaagaaaaggatggacatgaattttaaaaaggaggatgagccatttattcatcaaatgtgatcacctggatcggatctatgaatttatcgccatcctggatcgcgaaatagtactggcctttacttttatcgttgagcttgatcgaaccgatctttttccctttatcgacaaagtcgtacaatgaaacattaacatcttttagccggccgtaaatgctgctggtattgtcggcgtgctgcaccttcaccgtcagtcctgtttttttatctttgctcacttccataatgtagccttcttttacgctgtcaatggcttcgctggcggtttcgacgacgacgccttctccgttattttgaaagtcctgctggattttccccgcggcaggaacggccatatcctgactgaccgccacctgaccgtccttctttttcgttcccggggtaagaaaagcgagcgggtttccgaaggaagatacgaaccaattgcttacggcagcaaactgaaattctttttgaaaggtttgtgcgatcgccggtttgatctgactcagcggctgtttgtcagttttataggcaatagcagagatcagtacgagacaggcggccagcaggcattttaaaataatagaatgagcgctgatcaatgggtgccgtccgttaaattcaggcgggtgttccgtttgatattcgtagtccggtagaagcttgtgcttttcctgctccttgaccgtctgccacgcgggaaaattctgcgtttgggcgttttgaacgaaagtccgttttgattcaggccgctgttttcttcttttggccagtctttttctaatttcatcagctctgtgactcatcgccatcatcctttgcaatcgttgggtttgtacatcctatgtcttgtccattgcaaatatgcgctcttgaaaaacaaaaaagacctgataagctgggcttcatcagatctttgtattctggtatatattatgaacgcacgccgaaaaatgacttgattttcgccatcatccctttttgctgctcttcaagcacctgcaaaggaacggattctcctaaaatgcgccgggcgatattgcggtacgcaatgctggcgcggtttttggaattcatggcaatcggttcgccgatatttgaagccctgatcacttcatcatcgtcagcaacgattccgaggagatcaatagagagatgatgaacaacttcatccacatccatcgtgtcaccgtttttcaccagatgatttctgatgcggttcacgataaggcgcggcggttcgatatcttcctgctccaaaagtccgataatgcggtcagcgtcccgcaccgctgatatttccggcgtcgtcacaacaatcgccttatcagctccggagacggcatttttatagccttgttcaattccggccggacaatcaataatgacataatcaaattcctgcttaagctcctgcacaagcgatttgatctgctcagggacaacagccgtcttgtcgcttgtctgggcagccggcattaaatgaagcagatcatcaaaacgtttgtctttgacaagcgcctgatgcgtcttgcatctgccttcaattacatctactaagtcgtaaataattctgttttcaagacccattacgacatcaaggttgcgcagtccgatatctgtgtctaccaaacagacgcgcttccctaaaatggctaaggcggtaccgaggtttgcagatgttgttgttttacctactccgccttttcccgaagttattacgatagcctcacccaatttcacattcctccctcaagccttgttagatcaggtcttaaatgagccaattgctgaaggcgttcaatgaccatatttccgtcagtatctaaataagcacattccatgtcgttccctttttgaatgtggtctggggagcgatttaacacgtgattgatcctcaattgtgtcggcatcatttctgatgcggcgatcacagcccggttatttccgttataacccgcgtgggcaatcccttttaatgaaccgagaacaaatatatttcctccggctctgatcgtaccgccgggattcacatctccgattaaaagcaaatctcccgtcacgtgaagcacctggcccgaacggacaattttggaaacagaaacaatttcctgctcctctttcatccgctgcgcttcttctttggcaatgacttcactgtcaattgaatgcacgactaaatctttctttgacgcgatcagatcagtcagctgctctgcctgttcctgatacagataccgatgcccgagtttaatatgaacactgattttttggcctttgccatcagtatattgttcaatcgacagcatgttttgaagaccatcgagaagctcatcaaaagaacacgcatcatccagatgcaatgttaagccgttttttgttccttttattgttacatattgctgctttttggtcttcatcaatgttcacctcaacaacatactcttttcgtcaaaaaaagataaaatcctttttactcatctcttaattctttcttcagacttatataaaacagcctgaagggcaggactaatataacagctcccgcaatattcagcaaagcagtcggcaagaaccgctgaatgacaaaatcgttaaacgtcatagtgccgctgcggattaacgtctgaatgccgtagacgtaaaattcaagcacacatacgctcagcactgcaaccagaatgaccatcagggcgtttgtctgcagcactttaaacgctttggccgccagatagcataaaccggcaaaaccaaacatataaacgcctaaaacacccgtataattgatgtcataaagaaatccgaaaatcaaaccgtagatcaccgcatgcttttggttgatataagcggacataaaaatcagcgcaagcaaaagaaaatgcggaacgacctgctgctcgacggaaacgaaaggaaaacgcaccagatccgtatagatgctttccgcacaaaagaccaaaatcataatcaaagggagaaggaaacgtttcacgatccttcctcccctgttgctacgcttcggttcacgacgatgacatggtcaagatcgtacaggtcggcagccggtttcacgtaagcgattttcgtcaggccgtaagcatctgattctacatcggtcacttccccgaccgtcagcccttgaggaaatacgccgcccgttccggatgtctccacgaggtcgccttttttcacttcacgtttttcatccggctcaaggatggtcattttcagagtctgcttctttttatcatacccttcaattaaaccgtagcctttgctgccctttttgccggagattttggtggccactctgttattgcggtcaacatcgctcagcagctgaacggcggatgtgaaactgttgagtccgctgcttttgatcttcccgaccagcgcacccttttcgttcgtgacagccatgtctttggccactttctgcttcgttcccttattgatcatgatctgcttgtaccattgatcagggtttctggcgataacggtcgctaaaatcggatcatagtcggaaattgatttgacatgtccgagttcatcacgcagcttcttgttttcatctttgagttcttggagcttcgcttcatattgtgtctgtccgtccagcttttgtcttaagcgttcgttttccttgtacgtgtttttcaggtcttttatgtccccgaagaaccctgcaaaatattcggcaggcgtgtgaaaaatgttttgaaatactcccgtcgtatcaccgatcagcttttcaggccaggtggtattacggccgttcttcagcgagaatccaatcatagccaccaatatgataatacacagaagtaatagcattaaccgtttgttcggcatcgtgatacacctcttctatttaactcctgattatcttgtttttcctttgaaaagatggatgtgctccagtgcttttccagtgccgatcgcaacacaatccagcggatcttcagcgataagaacaggcattttcgtttcgtcgctgatgactttgtcgagattgcggagcagggcgcctccccctgttaatacaatacctctgtccataatatcagcggccagctcaggcggtgttttttcaagcgtgctcttcaccgcgtcaacgattgagagaactgtatcacgcagtgcatttgcaatttccgttcccgtgatttcgatcgttttcggcagacctgtcagaagatcgcggccgcggatttccattgacgcattttcttcaccggtttctgctgaaccgatttccattttaatagcttccgccgtacggtcaccgatcatcagattatatgtttttctgatatagctgatgattgagtcgtccatttcgtcaccggctacgcggattgactgagacgtgacaatgccgcctaaagaaatgatcgccacttcagttgttccgccgccgatatcaacgaccatgctgcccgtcggctcccataccggaagattcgcgccgattgctgctgcaaacggttcttcaatcggataagcgtcacgtgcgcccgcttgtcttgtcgcgtcgatgaccgcccgttcttcaacggccgtaatacctgacggcacacacaccataacgtaaggctttctcgcaaacaatcctttatttttcacagcctgattaatgtagtatttcatcattgtcgcagttgtttcatagtcagcgataacgccgtctttcatcggacggagcgcgaccacgttgcccggagttcttccgatcatgtttttcgcatcgttaccgaccgcaacgattgacttcgtatccgtttgcagagcaacgacagacggctctctcactacgattcctttacccttaacaaacacaagcgtattcgcggttcccaaatctataccaaggtctcttgtaccaattccgaacatatgtatgtatcttcctttcttaaagcaaaaataccctaaagggaaaaactcataaaatctattatatcttaaatcaacgaaaaaaaaagtgttacaaatatcctttttcctttaaactcacaaattttttgtcaccaatgaccaaatgatccagcagctcgatgccgattaaatttccgcactcaaaaagccgcctggttacctctatatcttccctgctcggtgtaggatctcctgaaggatgattgtgaacgcaaatgaaggacgcggcggatcgtttgaaagcttctttaaacacctcccgcgggtggacaatagatgaattcagacttccgataaaaacggtgcgtttatgaatgacttgatttttggtatttaaatataaacagacaaaatgctcctgggataaaaagcgcatatcctccatcacatacttcgccccgtcttccggagagcggatgacgcaatgctccccggcggatgtcttatgaatgcggctccccagctcaattgcggcaagaatctgaacggctttcaccgtgcctattcccggaatgctggaaagctcctgggcagaggcgccttttaacagtcgcagcccgtcaaacgtccgcagcagccggtgagcgaggttcatgacggactcatgtttcgttcccgtccgcagcaggatggcgagcaattcattgttagagagatgttcggctccgaagtgcagaagccgctctctcggtttttctttttcggggaaatctcttaattttaacggcagatcacggatgatcaacccctccttgttccccttcccggtttgaacatcaagcttttatattaaattctttcaaggctctcattgttttagcgacaggaagcccgacgacagaataaaaatcaccgtctatttttttcactaaaagcgcgccttttccttggatgccgtatgcacctgctttatccatcggttcttttgtttcaatgtagagctgtatgtcgtcttcactgagcggccaaaacgtcacttccgtcgtgtcacagaacgtttctttccggtcatgcgtctgaatgctgaccgccgtaatgacttgatggcttcggccggaaagcctccgcagcatgtgtgccgcttcttctctgtcatgcggtttgccgaggcactcgccgtctatgcacaccatcgtgtcagccccgataacgactgcatcgggattttcggccaatacagcaccggctttttgctcggccaaacattggacgttttcttccggcgaaaggtttcgatttaatttttcttctgtgcggcttgcaataatgctgtaaggaatctgaagaagattaaggagttcttttcttcgcggagattgtgatgcgagtattaagcgttttgtcatgattgtcatcctttcagggtttgcttaagaaaaaaagatacttgtctatcctaccaaatcaaacgggcaaccacaatttcagaaaaataactttttgatgacaaaataaaaaatcccgccggatgacgggaaatgagatactattttacaacacttaaaagctctttttgggctttccagccggattccgaacccgacgtttccagttctttcagcgcttgaaggacggcctctttctgctttttgtcagcggcgtctgcaccgtctgccgcttttgctgcttcagccacttctgtttttgaaagatctttgccggtaatcgctttggcggagagctcagatgcctgtttaaaagagtcttccagtcctgaatcgaccgcaaagctgagctcttttccgccccaagcctcaaaatcatggtctatcagtgtctgacccaattgctgtgataagcttttttccgctgcaagcccggcgatcacgtatgtgtatccgtcttcttttgccagagagacggccgagtatcctttttcagtcagctggtcaacaagcgtttgcgctcctttttctgatgaaaattttccggcctgcaccgcatatgttttatagtttccctctgaagattccgcatctcctgtgccggctgtttcagatttgtctttagaaacatctcccgctttcgccgtctgcccttgtgaacctttgtcagctgatgccggagcggaggcttctttacttcccgacatatttaaggcgacaaggccgagcccggtgcctaaaacagccgcaacggcaattgtcgtgaccgcttttttaactggagaagacggctgcttttttttcggaaaatgagggccgttttttttcttctggtatggcggaacgactttcgggtcatcttcaaatacctcagaattcttctcatgatcccaattgaaatcttcttctttcggatcttcatgggatgcggcggtctcctgctccgccttttttgtttcttcccaatttgaaaatgtgacggttttctccccgccttctttcacatcttcttgtccatacatcgtttcttcttgtccgttaatggttactttaagggcattgttttttgcgttgctgtgctttttgctcttcctttttttcaacgtctcttcccccttgcattcgtcttggccgtaccttgaactgatcatggttcacactttagcataggcgaaaaaaaaaagaacaagacttttgtcgtcttgtccaaaaaacgttcgccaaatttttcaagcccctcctgaagcgagcttgatgtaaaacgaaaacagctcttcaccgtataaataactcaaagcgctcccggctgagatggccggcgcaaacggaaatggctgctttttaccaagcctgccccgggctgcggcgcacataccgtatacggctccgatcataacggagagaaagaatgcaatgagcacgagcttcacgccgagcgtcaggccgatcaccccaaacagtttcacatcacctgcgccgatgcctcctttactgacaaacatgataaaaacaagcagaaaaaatccgcaaacggctccggcaaaccctgcataccatgaatccagcggagaaaacatacggccggcgatgaaaagcggaagaaaaaacagcagaaccttgtcaggaatcagcatatattgcagatccgtcatagtaacaatcatgagcagagacagaaataacagcgcgactaacagttcttttgagaaaccgaaatgaatgcctgcagccgtaaataaacacgccgtccagcattccgccgccggatacataaccgacagcttcgcacggcagtttctgcatctgcctctttgcataatgtaggaaacgacgggcacaagctccccccaggagagcggcaagcggcaaaacgaacaggctgaacgcggcgaaataaccgagattcgcagcgggatacggcacgctgctgtataaaaaaaagaaccgaaaatcaagccgagaaaaaacagaaccaaaagcactcagaccacacctttactatcaatctggctcagattatagcaaagaaaaacaccatgactgaaatggctgaaaatatattttcagcataaaaacacccggcaaaaccgtaaaatggtctgccgggcatccgaggggctgtcagataagccgctttctcatttctgaaataaaatataaggagccggtaatgatgatgacatcatccgccccgtctttttgttctatccattctttcacactgtccgggttctcatcgaagctcttatccgctagactgcttgcgttataaagggcttcggcgcttgaagcacgcggaaagtcaaatgatacaaagtgaatggaatccgcttcggtttcaagctttttaatcatttcctgatacggtttgtcttttaatgcgctgaatacgacatggacgtttttaccggcaaagcgctgccggatcgtttctgtcagcgtttcaacgccctcttcgttatgggcgccgtccgcaaacactaaagggcggctttgaagacgttcaaaccggcccggccacgatgcttttttcaggccgtttcgcatcgcttcttcagaaatggctgcggctcccagacgattcacccattcagcggccaatatcgccaatgccgcattctgcctttggtgaatgccgatcagcgacgtttgaatgttttcatagcatttcgtttccgtttccagcgaaaagctttcaccgtacggaagcgccgcttcattaaacagtctgcacgttttatatagtgactgatacggagcctgctttttttcggcttccgcttcaatgacgccgagtgcttccggctgattgacgcccgtaataaccggaatggaatttttaatgataccggctttctgcccggcgatctcctcgatggtatttcctaaaatcgccatatggtcatgtccgatacttgtgataaccgacaggagcggattcacaatattggttgaatcaaatgtgccgccgagccccgcttcaaaaatgacaaaatcgatatcagcccgcttcgcaaaatataaaaatgcacacgctgtaatgatttcaaattctgtcaccgttccggcatcggtcttatcaagctcatcgactatcggttttatgtcaataacgagcgttctccattcctcatcagaaatcggcgtgccgttgacgctgatacgctcattaaacgtaataatgtaaggcgatgtgaacgtgccgaccgtataaccggcttcttgaagcacggaacggataaaagcgacggtcgatcctttgccgtttgtgcccgccacatgaatggcgcgaatgttcttttccgggtgttccagtttttccatcagcttttccatacggagaaggcccggcttaacgccgaacttgagtctgccgtgaatccagctgatcgcttctttgtacgtattaaacaatgaaatcccctcttttatacgacaaggcggtttcttaagaaaccgccccgctgttttatcagcctttcagctctgcaatccgctgccggacagcttcgcgttttgccgtgtagtctttctcttttccgcgttcttcttcaatgacatgctcaggagcttttttaatgaatccttcgttgccgagttttttctgaacgcgttcgacttcttttgtcagcttgtcgaattctttttgcagacgggcgatctcctcatcaatgttaatcagcccttcaagcggcagaatgacttccgctccggtgacgaccgctgtcatcgctttgtctgccgcagtgatatccgtcccgattttcaacgtgctcggattcgtaaagcgttcaacgtaagaacggttcttctcaaggcggccggcaatgtcttcggtagatgttttaatgtaaagctcaacctgcttgctcatcggcgtgttgacttcgctccggatattgcggacagaacggattaattcaacgagcagtttcatatccgccgctgcctctttatccgtatgttccggcaccggaaccggccaagagctgatcgtgattgactcgccttcatgaggaaggtgctgccagatttcttccgttaagaatggcataaacgggtgaagaagacgcatcgtctggtcaagcacatatgccagaacagaacgggttgttttcttcgccgcttcatcttccccgtacagcggaagctttgccatttcgatataccagtcgcacacatcgtcccagataaagttgtacaggtggcgtccgacttcaccgaattcataacgatccgcaagctgggttacgtcttctatcgtttcattcagtcttgtgaggatccacttatcagccactgatttttcaccggacagatcaagctcgtcatacgtcatgccgtccatgttcattaatgcaaaacgggaggcgttccaaattttatttgcgaaattccatgtggattccactttttcatagctgaaacggagatcctgtcccggtgaacttccggttgccaggaaatagcgcagggaatccgctccgtacttgtcgatgacatccatcgggtccacgccgttcccaagggatttactcatttttctgccctgctcgtcacggattaagccgtgaatcagcacgtctttgaacggacgctcgccggtaaactcaagaccttggaaaatcatccgggatacccagaagaaaatgatgtcatatcccgttacaagaacatcggttgagtaataccgcttaaagtcttcagcgttttcatcaggccagcccattgtagaaaacggccaaagcgcggagctgaaccatgtatcaagcacgtctgaatcctgttcccaattttcactgtccttaggcgcctcaaggccgacgtacacttcttttgtttctttatgataccaagccgggatgcggtggccccaccacagctgacgggaaatacaccaatcacggatattttccatccagtgcaggtacgttttctcgaaccggtcaggaacgaagtgaactttctcttcttttgactgaaggtcaaccgcagcatcggccagcggctgcattttgacaaaccattgtgtggacaggtacggctcaacaacggcgccgcttctctcactatgtccgacagaatgcatatggtcttcgattttaaagagaacaccggattcctgaagatctttgacgagttttttgcggcattcaaaccggtccatgccgttatattgcagcgctttttcattcattgttccgtcttcattcatgacgagaatccgctctaaattgtggcggtttccgagttcaaagtcattcgggtcatgggcaggtgtgattttaacggcgcctgatccgaattccatatcaacataatcatcgccgacgatcggaatttcgcggtttgtaatcggcagaatcaccgttttgccgattaagtgcttgtagcgctcatcttcaggatgaaccgcgacagccgtgtcgccaagcatcgtttccggacgggtggtcgcgatttcaattgagcctgaaccgtctgctaacggatagcgcaaatgataaaacgcgccctgtacgtctttgtaaattacttcaatatcggataaagccgtttttgtggcagggtcccagttgatgatatattcgcctctgtaaatcaagccttttttgtacagcttgacgaatacttcccgcactgctttgttcagcccttcatcaagagtgaaacgttcgcgcgaataatcgagtccgagtcccatcttggcccattggctgcggatgaaatcagcatactcttccttccacttccacgtttcttctaaaaacttttcacggccgagatcataacggcttgtgccctgttcgcggagtttcgcttcgacttttgcctgagtggcgatgccggcgtggtccatgcccggaagccagagcacgtcatagccctgcatgcgtttcatacgcgtaacgatatcttgcagcgtcgtatcccacgcatgtccgaggtgcagcctgcccgtcacgttcggcggcggaatgacgacagaatacggctgtttcgtttgatcgccgcccgcttcaaaatattttcctttcagccaaaaatcatagcggcctttttcaatcgcagacggatcatattttgtcggcattgtttgttcgtttgtatccatgataaccctccagcatgtttagaaatggctgagcaactaaaaaagagccttcatcctgataaaggacgaaaagctctttcgcggtaccaccttttttcatgaacagatttgttcatgcacttaaacggataacgggtgcggcccgaatttctctactgtatgttcaagaaattatgctcccgggcgaccttccaatgagacagcataagaagcctttcagcacagtagcttctctctcttcatgcgtctttcttgtactcttcccgttcaaagcaggtgtatttatatcagctcatgatcttatttattatgttctttattatagtaaaagtgtttttgattcgtcaatcatcttttccaaaaaccgctgccgtcatacataaatgggcatgcaccccgccctttcccttacatacgatacatagaaaggcgaatgtgaggaggaattgcccgtgagaaaaaaattcaattcttattcgctcccccagtgggccagacaggtccgccttgtatccgtgcaagtcattatcccgattacgatctttcaggggatcaggacgattttctttccgacgacttttgatgtcctgctgcttgccatcctgctgtttttagcgtgcgccctgcatttggaatggatataaaaaaacgagtcccgttatgaagaggactcgttttccgcttttatttttttctcccgctcaatctgatgaaccttcatgagaaaaggctcaacatttttcatctgccaaaacgctcttaataattgcgtgcactcttctttttcagagcccctttggccggtctgataccgtttcagcactttgtacatggcggacggataagccatatagctgagaaacaggctgatttccgcttcacggagcgggaatgatttgtgatacgtataaaaccagtccagacattccgggcatgctttcggatagcttctgaacattctggagtaaaagccgagcaggtcgttttgcggagggcccagcgcagctttctcgaaattcgtgaaaaagcccgatcccgcatcattatacagaaagtggcggctcgataaactgccgtggttgatcaccgctctcgtcttgtcatgaccctttgccgcgtcaaaccattcttccagacgttccagagcaaaattgacggcagaaaccgtttctgtaagatacgtaacagcctgcagttcaaaaggtgaaagataccactctttttccgcccggtcggcgaattgttcatagacaagcttatcattttcccaatctcttttcgttgcttcataaaagccgctgatatcttcagtccggatttggatgtcccgcacagtcgcggagtggagcttcgcgacctctttaaaaaggtaaacatgtttttgatcccattcctcttcctgatcgtactgaagccaaggcattaaataataagaattctccgtctgtgttcccgcaaaaaaatcgccggcatacgtgcggcagatcggcacaaatgatcggtagcctttctcctcaatctcaatcataagatccgtaaattcactgctgcgggccggcttgagctgtttcaaagcaaaaatgccgtagtttgagtagaccttccaaacatgcgggctgacaggctcaatatactcagccgccagcccgtattcctgaagcactgattggactgcttccattccattcaccacatttttacggcctctttgtgcttacgcatggctgttattatattcaggtatatacagaagctgaccttcttcaagctcgtcatcaaacgataaagcattcgttctgatgagctgctgggatgttatgtcatatcgttcacacacccggtcgatagtatcttgctgctgtacgatacaaattttcattcttgaaaacttttcttcttcccttgtaaataattttgtcaagtaatgagagttgtcattttccttctgctcggttcccggtgccgcttcttcattctttctttcagacttaagcggctcaggcggttcagcttgcgccggctcctcaggcggcagtttggaaaactgaaaagacaaatcgagaggcttcccggtttcctccggcggcgccatcttccttacctcaatttcgaaccctacttcatcctgagcctcttcttcaagcagcttaggagcgctgtaaaactcctcttcctgctgttccggaacgaactcgcgataaacgggcgcctgctcttcttgaaaaaccgcaggctcatcttcgtcttctgccgcctcatgatcgctctgacggagaagcggctcggcctctggctgctcttctttttgaaggaagggctgttccgcaatttttggcttttctgaatgcggagtcagagtgaacgcagggaaaaccggctcgttatcatcttttggctcttcctgcacttctgctgaatcatcctcaaatacaggttcattcctcacagccgacatgattgcaggctcctcagcttcttccggctcttcttcgtgttggaaggaaacgggaggaggaggctcagtaaaggaaacaggtttcggcacctcttcctgctccctcagaaccgtggcggtctcctgctcttcttcttcccgcttcctcaaaatcggggcagcttcctgctcctcttcttcccgctccctcagaatcggggcagtctcctgctcttcttcttcctgctccctcagaatcggggcagtttcttcctcttcttctttgtgctccctcagaatcggggcagtttcttcctcttcttctttgtgctccctcagaatcggggcagcttcctgctcttcttcttcccgctctctcagaatcggggcagcttcctgctcttcttcttcccgctccctcagaatcggggcagctttctgctcttcttcttcccgctccctcagaatcggggcagctccctgctcttcttcctcctgcctgagtaaaggcggggtttcttcctcggtttcttgtgctgcttcttttgatacactcaaaggtatttcaggctcacggcgtatcattaattctggttggttttcgtcctccgaatgatgtccggcaagattgatcatttcttctctggcaaattcaggcgccacgtacaaagggatctccggctcttttggctcggattcctcaagcagcccttcaattgccaaatcagcctgaatggttaagatccttgaatccgtcagctgataatcaaaggcatcgataaatacgaaaacatcattgaggtggctcactttatttttcggaatcgtaatgtccaccgggaaacaatgaatgagctcggccgtgccatcctccctcgccctcacttcctctacatgcctcagctccctgtcaagctcttcaaaatgactgctgtgatctatgttgtactcgccagtaagttctaatgatcctttaattgagacataatcatttacttcctgcaccctgatgtcagggtctaatgaaatcgaaagtaattcagaaacttcctgtcctttttggaaacagattgattcttcaacagaaaattgcaatcggtgattatgcggcaagttcatatcctcctttcatctaatccatacaattagatgtcactaaaggtgtatgccgcaatccggggaaatatgataatggaggcattgaaaaaagccgatacaagtcttgcttgcatcggcttttcggtatcagcggctgatcgcctggaacactttctcagcggcttgaatggttttttcaatatcctccattgtatgcgcagtggagagaaacaatccttcaaattgagacggaggcagaaatacgcctgcatcagccatccctttataatatttggcgaacagctttaaatcagaagatttggctgtctcatagttaatgacaggctcatttgtgaaaaagaagccgatcattgaacccgcccggttaaacgtgtgcggaatgccatgtgcttcagctgcttttgaaatgccttcttcaagcatatcgccttttttcacaaattcttggtaagattcaggtgtgagctgctgtaacgtctcaagtcccgctgtcatggcaagcggatttcctgacaatgttccagcctggtagatcggaccgctcggcgcgattcgttccataatgtcagcttttccgccatacgcaccgacaggaagaccgccgccgatgactttgccgagacacgttaagtcaggcgtcacgccgaaatacccttgcgcacagttataatccacgcgaaaaccggtcatgacctcatcaaaaatgagcagcgcgccatactgttccgtcatgtcgcgcagcccttgtaaaaagccttcctgcggcggaacaacgcccatattgcctgctaccggttcaacaatgaccccggcaatatcttcaccgtattcacggaatgcgagtgcaacgctttccaaatcgttgtatggaacggtgatcgtattcattgctattccttccggcacgcccgggctgtccggaaggccgagtgtcgccactccggatcccgctttgatcagcagcgaatcaccatggccgtggtaacagccttcgaatttcaaaattttgtttcggccggtatatcctcttgccagacgcagggcgctcattgtcgcctctgtgccggagctgaccatccgtacgatttcaacagacggcacacggtcaatgaccaatttggccagttcgttttccacttcagtagatgccccgaaacttgtcccgttctcggctacttttttcaggctttcaacgacccggtcgttcgtgtggcccaatatgagcggcccccagctcaggacgtagtcgatatattcattgccgtcaatatcaaatattttcgatccttttccgcgctgcataaagatcggatccatatcaactgatttaaacgcgcgcaccgggctgttcactccgcccggcatcagtttctgcgcttctttaaaagcggcttttgatttttcatagcttctcatctgcctcagctcccgtcaaatgaaatcgttactcagcaagccattttgctgcgtcttttgcatgatacgtcataatcagatcggctcctgcacgtttcatgctcgttaaaatttccagcaccatttctctttctttaatccagccgttttgggctgccgctttcaccatggaatactccccgctcacattatatgcgaccagcggcaggtgatggcggtttttcacatcacgcataatatctaagtatgacatagacggtttgacgattaaaaagtcagcgccttctgccgcgtctgattcagcctcacggagcgcttccaagcggttggccggatccatctgatatgtttttcggtctccgaactgcggcgtgctgtcagccgcgtcgcggaacggaccgtaaaattcacttgaatatttcacggcataagacatgatcggaatattcgtgaatccttctttgtcgagcgcttccctgatcactgtgacaaaaccgtccatcatatttgaaggagcgatgatgtcagcgccggctttggcctggctgacggctgtctgagccagcagttcaagcgactcgtcattgaggatttctccgtctttcacgacgccgcaatggccgtgatccgtgtattcacagagacacgtatcagcgattacgatcatttcaggataatgctttttaatttcagcaatccctttctgcacaatgccgtgatcgtgaaaagcctgggttccgcaggcgtctttttcttccggcacgccgaaaacgatgaccgacttaatgccgagcgatatcagctcagccatttcatcctttaacaaatcaagtgatacatgataaacccccggcatggaaggaacttctttttttccttcgagcccttcaacgacaaataacgggtaaataaaatctgaggggtgaagacgtgtttcttttactaaatctctcatcgcagcgttcgcgcgcaaacggcggtgtctgttaaatgtttgattcatcattatcaatcctttcccgacatactgcacatgacgtccagcatgccttcaatcgtataagtgtcaggcacatgggatgagatcccgtattccaagagcgctttctctgtcaaagggccgatgctgatatagctcgcaccgctgttttcccacgctttttctccgtctccgaccgcgtgcataaacgtatgcaccgccgatgagctggtaaacgtaataaaatcaaaatgagagcgggatgcagcccgtctcagctcgtccatgcctttttcatcctgaatggtattgtataacacccattcccttatttgatagccatgcggctcaagctccgcttttatgacatcgcgtgataaattgccctttatcactgaaatgggttcggcagctgatgcgtgccgttttaaagtatcagccagacattccgccacatactcgtcaggcatcgcatccgtccgggctccccgctctttcagggcgcgcgcagtcttttcaccgacggctgcgatttttttccgtcccgaaagcgcaagaccgtgacgatcaagataggaaaaaaagaaccggacaccgtttacgcttgtaaacacaagccatcccggctcagaaaggtcttcccgcagactgtccgcacattcatccggtagcgcttcctgaaaagcgatcagcgaagcggaaacagccgttccgccgagcgcctccactttttttcggaacggtgcggcctgtcttttgttccgggtgacaagcacggtctttccttgtaaaggaaggtcatttgccatcctgatcgagctcctgtttcacgctgtcgattagtgctttggctcctttttcagacatcatcgccgcacagcgtttcccgatttcttccggatcatgtcccgccgctgtttctttataaatcgtctttccgtccggagacgcgacaagaccgaccaattcaacctcatcccggtcattgacggacgcatacccggctatcggcacttggcagccgccttccatcgcgtgtaagaaagcccgttcggctgccaccgtgcgctgcgtatactcatcggtaaattgcgcaaacagcttcaaaagctcctcatccgactctctgcattcaatggcaagagcgccttggccgaccgcaggcagacagcggtccggttcgagaaattcagatacgacatcatctttccagcccattctcgaaagtcccgcagccgctaaaataatagcatcgtaatcttccgtttcaagcttttgaagtctcgtatcgatattgcctctgatccacttaattgtaagatcagggcgttcagcaagaatctgggcgcttcttcttaaactgctggtgccgatgatgcctccttcttttatgtcgtccagcttttgatgcccctttgaaatcagcgcatcacgcggatcctcacgtttcggtatgcatcctatgacaagaccctcaggcaaaaccgcgggcatgtctttcatgctgtgaaccgccatatcaatctcctgatgcagcagcgcctgttcaatctctttgacaaacaaacctttgccgcccacttttgacagcgtaacatcaaggatgcggtcgccttttgtgacaatctcccggatttcaaagttataggaagggttcaattccttcagtttgttaatcacccattttgtctgggtcatagccagtttgctccgtctggaacctaccttaatcgttctcattttctttcctcccgaatctgtttgggcgcgtgcgttaactgaaccaatggaattgcgacaggcttccgagcaggaagtaattaatcatcagcacgagaaaacatgctgaattccataacgccgccacttttccctgcagttccttaatcattctgatatataagtagtagctatataaaagcagcacaataaacgaaccgagcacttttgaatcaaaccagtacagcgtttccagcgacacatacgcccagatcacgcctaatatcaggctcaacagcagcatcggaaccccgatgacatttaaaacgtaagccatataatcaagttttgacaaatcttcaattctcaacagccattttccccactttttcttctttaataaagaatattgaaactgataaagaagcgaaaagacaaaagaaagggaaaaagcgccgtaagacagaatcgccattgtaatatgaatgaccaaaagctctgagaccagctggccggaaaaagcggccgaatgctgatccgtcggtgaaaacgtatggatcgcaatcatcgagaaaccgatgacattcgtgaaaaacacgataaaatcaacacgcagaatctgcgtgaccacaagtgagagcgtgacaagcacccacgcataaaagtaaagggcctctgtaatattcaagaccggaaatctgcccgtctgccacatgaaataagaaagatagacggtttgcagagtccagacaatagaaagcaaccagaaggccattttcccagccttccggttgtgttgaagaaaatctataaagtaaaaaaggacgcttactgcataaataacaattgtcgcttcattaagtcttgccattgctgtatcaatcatacagccctcactcacttacaagcggacgtaagcccgtttttgcttctgccttttgaaacgaatgaaccgtctgacggttatccagacttttgtccagctggcggccggcctcttcctcaatatcgaaaatctgcataaacagcttcagcttttcatctgaatccgcttcggccgcaagctctttcgccttcagaatcgggtcgcgcagcatttggttaatgatgcttttcgtatgtttgctgagaagttttttctctcttaccgtaagatgaggcagcttgcgctcaatgctctgcatcgtatcggactggatggacagcgccttttcacgcagcgccgaaatgaccggcacgacgccgagcgtattaagccactgcttaaactcaacaattgccgcttcaataaacagctcgactttttcagcggtttcacggcgttcttgtaagttggcttcaacgattccttcaaggtcatcaatatcatacagaaaaacaccttcaagatcgttcagcgccggatcgaggtctcgcggcacagcgatatccaccataaataacgggcggcctttccgctgtctgcccgctctctccatcatttctttagacacgacgaaatcacttgcgcctgtcgaactgattaaaatatcagcttcagcaagtgcatgttcaagctggtttaagctgcgcgcttctccggagaaacggtcagcgagcgcttttgccttcaaaaacgttctgttgatgaccgttactttgccgatgccctgaccgtgcaggttttctgcggcgagctcgcccatttttcccgcaccgagaatcaaaatgtgcttatttgacaatgagccgaagatttttttcgcgagttcaacggcggcgtaactgacggaaacggcattggcgccgatatcggtttcagcatgcgtgcgtttgccgacggtcaccgcctgtttaaacagctcattgaaaatggtgccgatcgtcttttctgcctgcgccgttttaaagcttgagcggacctggccgagtatttgcgtttctccgatgaccatggaatccaagccgcacaccacacggaataaatgctcgatcgccgcgtcgctctcataaaatttcagaaacggagacagctcttctttcggcagcgagaaccattcggataaaaatgtttttatataataacggccggtatgaagctggtcgaccaccgcatatatttcggtgcggttgcaggttgacacgataatgttttcaagaacgcttttttcttcttttaaacgaagcatcgcttctgcaagctcatccggctgaaaacttattttttcgcgtatttcaataggggcggatttataatctactcccacaacaagaatatgcatcgctttcatgcacccccgtacatcgcaatttatttataatcattctaacatagaatttattatttataataattataacatagtttcttcgggaaaatgtgaacagatttcaaaaatgttatgctatagtataaaaagctcgtttccactgtaatcatcatactaaaaatcctttactgcgggtaggtgacaggatgaaaaaaacatcaattttattaccgggacttctgcttgccgcttcattattcgcatggcttcagagcggacaggttcacctgtttgagaatcagggagaatggccggtgctccttatgcttttgggcgccgtgctcttgtatcagggcaaaaaggaagcggccgggcctcacgtcctgatcggcatgcttcttttcggcataggtttacactttttcgccaaacctgagctctcatggtggccgggagattttgaaatgattctcttcgtcttcggattctccttatttgcggcagccagaaaagaatatgtatacgaagcggttgccatgattggtttttccctctttttatacttctttaaacaaattacggcgtggctggagtccgtccatattccgacggaacacttcaaaacatactggccgtatgttttcatcggaatcagccttttattattgtttatcaagcggaacaaaactatacgataaaacccaaaacgcactgcgttttgggtttttcattaccggctgatcatttttttaatggctccccatgcttcatctttgccttttttcgtttcagaggaaaataaaatcagctcatcttcaggatccatatcaagcgtctgtttgacaacctttaagtgcttgtcccattttccttttggaatcttatccgcttttgtcgcgataacgatgacgggaatgccgtaatacttcaggaattcatacatgttcacgtcttcagcagacggcgcgtgcctgaggtcgacaatctgcacgcaggctttcagctcttcgcgggtcgtcatataggtttcaatcattctcccccatgcttcccgctcgcttttggaaactttcgcaaatccgtacccgggaacgtcgacaaaatgcaattcatcattgatgatgtaaaagtttaaggtctgtgttttccccggttttgatgacgttctggccaagtttttccgattgattaatgaattgataaaagatgactttcctacatttgatcttcccgccagcgcgatttccggaagccccccatcagggtactgttcgggtttgaccgcgctgatcacgatttctgactttgtgactttcatttcttctctcctactaaggcatgttccaaaacgtcatccaggtgagaaacgaatataaacttcagtccttctctgacgctttctggaatatcctctatatctttttcgttatctttaggcgcaataatagtggtcaggcccgctctgtgcgcgccgagcgccttttctttcagtccgccgatcggaagcacgcggccccgcagcgtgatttctcccgtcataccgacttcgcgttttaccgcacggtccgttaatgctgaaacgagcgccgtggccatcgtaattccggcagaagggccgtctttcggcaccgctccttcagggacatggatatgaatgtcatacttctcatggaatttcggatcgattccgaactgttccgctttcgagcggacataactgaaagcggcctgcgctgattcccgcatgacatctccaagcttcccggtcagaatcagctttccttttcccggtgacaatgacacttcgattgacagcgtatctccgccgaccgtcgtatacgcaagccccgtgacaaccccgatttgatcttcggtttccgcctgtccgtatctgaatatccgttttccgagatagtcggccagatttttctctgtaacggtaatgcgttttctctcctcagacacaatggcttttgcagcctttcggcaaatggcggcaatctggcgttcaagcgttctcacgccggcttccctcgtgtagtagcggatgatgtccgtaatcgcctggtcccgaatctgcaggttgctctttgtgagcccgtgctctttgatttgtttcggaagcaggtggtccttcacgatctccagcttttcgttttcagtgtagcctgacaggctgataatctccattctgtctctgagaggtcccggtatggaagcaaggttattcgcagtcgcgataaacagcactttcgataaatcgaacgtctcttcaatatagtggtcgctgaatgtgctgttttgttccggatccagcacctcaagcatcgccgaagacggatcgcctctgaaatcggacgacattttatcgatctcatccaggagaaagaccggattttgtttgccggcttttttcattccctgtataatccggcccggcatcgcaccgacgtatgtacgccggtgcccgcggatttcagattcatcgcgcactccgcccagtgaaattctcacaaaacggcgtcccatgctcgtactgattgattttgcaagagatgttttaccgactcccggaggtccggccagacaaagaatcggccctttcagcgttttcgtcagctgtttcacggccaaatactccaaaatccgctctttcactttgtctaagccgtggtgctctttatctaagatttccccggcttttttaatatcaagtttatcttctgtttcatccgaccacggaagggcgatgagccagtcaatatagttgcggataacagagctttccgctgagcttgacggcactttttcgtaacggcttaattccttaagcgccgtttctttgacacgctcaggcatgcctgcttcttctatcttttccgtgagcgactgaacttcgccggtttttccttctttgtcgccaagctccttctgaatggctttcatctgttcacgcaagtagtattccttttgagtgcgttccatcgaacgtttgacgcgctgaccgatttttttctcaatctccagcacttctttttcattatgaatggaacggatgaccttattcagacgttctttaatatccgccgtttctaaaatgtcctgcttgtcctttaatttcagcgggagatgagaagcaacgatatccgccattctgccgggctcttcaatatcagtcacagccgcatacgtttctgcggagatttttttagaaatttttatgtactggtcaaaatggtccagcagcgtccgcataagcgcttcgtcttccacgtcttttgaatcatcttcatgcatcagctgtatatcgaccgaagtataatcttcgagctcggtgtattcaaggatctgcgcccgctgaattccttctacaagcactctgatcgtaccgttgggcagcttcagcatctgtttaatttttgtataagtgccgacggcgaaaatatcctcttcacccggttcgtctatcgaaatatcctgctgagtggctaaaaaaatcatatgatcatgcatcattgcctgttcaagagcctgaaccgacttgtcacggcctacatctaaatgtaaaaccattgtcgggtataccaataagcctcttaaagggaggagcgggatgctgcgttttgtatcttctgccatgtgactgacacctccgtgactttagtatgaaccattataatacaactttttcatcgttgtacaattccgggatcgggctttaatcggcttatccgcctgccctgtatataaaacagtctcttcgtagtataccctttctttctgttctgaaaaaggaaaagatgtcctccataaaaaaaccccattataaaaatggggtttatacggattctttattcatttggatatcaaacggtttttgttctgaaggagggtcaaccaatatgacgtcaagcacttcctggaacgtttttaccgctttaatggtgattccgtctattcgtttcagaatggactgctgattttcatatgggataatgaccgtttttgctccggcctgttttgcggctttaattttcggaatgacgccgccgatcggtttgacaagccccgtcaggctgatttctcccgtcatcgccaccgtatggtcgatcgggatgcggtgaatcgcggaaaaaatccccgcggccatcgcgatacctgctgaaggtccgtcaatcgggcctccgcccggaaaattgacgtgaatgtcatagtctgaaggtttgatgcccattgtgcgcagaaccgtcagaacattttccacagatcccttcgccatgcttttgcggcggatcgacttcgattggctgccgatgctttcttcctctgcaattcccgtgatattcaggcttcctttgtcctgcgcaggtgtgacattcacttcgatttccagcaatgcgccgctgttcggcccgtagacggcaagtccgttcacgatgccgacttgcggttcatcggcgattttctgctcatttttaggtgtaagctgactggaatgaacaacccattctatatcttctgtcgtaatttcttttctgtcctcagtcaccgccatgccggcggcgatctggatcatattgacggcttcacgtccgtttctcgtatatgtggtcagcacactgagagcttcgtcagaaatctctttctgaattttgtcggctgcttttttcgcaacgattttaagttcatccttttccagctcgcggaaaaatacttcaagacagcgcgaacggatggccggcggaatttcattcggcattctcgttgtcgctccgatcaaacggaaatctgccggaagcccattttgaaaaatatcatgaatgtgattcggtatttgcgtattttcttcactgtaatacgcactgtctaaaaatacttttcgatcttcaagcaccttcagcattttattcatctgaatcgggtgaagctcgccgatttcatcaataaacaatacccctccgtgagcatgggtcacagccccctgtttcggctgcggaatgcctgcttggcccatcgcacccgctccctgataaatcggatcatgcactgaaccgataagcggatcggcaatcccccgttcatcaaaccgcgcggtcgtcgcatcaagttcaacaaatacagcctgcttttgaaacggtgactgtttatgttttttcgcttcttccaataccagccgcgccgcagccgtttttccgactcccggaggaccgtaaataatgacgtgctgcgggttcggtccgcaaagcgctgcttttaacgctttaattccgtcttcctggccgacaatgtcctgaaagcttttcggccgcaccttttctgataaaggttctgataaactgatggcgcgcattttgcgcagctgttccatttctttttttgattctttatctatcgtcactttttgtgtacgctggtttttgagcagattccaaaaatataatccgatgactatcccgaaaaacagctgtacaaataatgcgatccctgtccaactcatgctggtccctcctgaaaaaacgatttatgtatccaattcattcctctgtccgctagtatctcccagcaaagcccggaataaacattttcagaagggtcaggacaagaaaaaaacctcctgatcaattcgagtcaggaggttttgtcatgttatgctgatgttttatcttggccgacaactgtgccgtcttttaatacaagacgcggtgcttcaccgtctgcgactgtcgctccggtaatgacacatttttcaatatcatcgcgggacggcagatcaaacatgacgtcaagcatgatgccttcaatgatagaacgcaggccgcgtgcgcctgttttacgctcgatcgcttttttcgcaatttcagataatgcctcgtcttcaaattcaagctcgacatcatcaagttctaacattttcttgtattgtttgacgagtgcgtttttcggtttagtcagaatttcaaccagtgccgtttcgtcaagctgctcaaggcttgcaatgacaggaagacggccgatgaattcaggaatcagaccgaaacggagcaagtcttccggaagaactttagaaagcagttcttctttttcaaggtctgccgctttattatcagagccgaagccgatgactttttgtccgagacggcgtttgatgatttgttcgatgccgtcaaatgcaccgccgcaaatgaacaggatgttcgtcgtatcgatctggatgaattcctgatgaggatgtttgcgtcctccttgaggcggcacgcttgcaaccgttccttcaagaattttcagcagcgcctgctgaacgccttcgcctgatacgtcgcgtgtaatggacgggttttcagattttcgcgctactttatcgatttcatcgatataaataatacctttttctgctttttccacatcatagtctgctgcctgaatcagcttgaggaggatgttttctacgtcctcaccgacatatccggcttcagtcagagatgtagcgtccgcgatcgcaaacggcacgttcagaatacgcgcaagcgtctgggcaagaagtgttttcccgcttccagtcggtccgattaaagaaatattacttttagaaagctcgacatcatccactttactgttggagttgatgcgtttgtaatggttgtataccgcaaccgcaagtgatttcttcgcctgatcctgtccgatgacatattcattcagaatctcacggatttcctgcggcttcggaacgtctttaaattcgacttcttcttctgtaccaagctcttcctctacgatttctgtacagagctcaatacattcgtcgcatatatatacacccggtcctgcaaccagcttacgaacctgatcttgcgtttttccgcagaacgagcatttcaattgtcctttttcctcgttgaatttaaacattctttcaccccttaatcttgtctcactttttcttttacctgaagggcaaaagaaaacggttcttgctacgatcgagtatgtattgcattttaccatactttccagtaagacggtaacaatgtgtttcgcacttgcacattctatatgtatgacgaaaaacagcccggcaatgactatcttgccccaagaaaaagagttatatcataattgtacaaaacaaggcacgaattaatcgcgccctgttttattatgtctattattatgaaccatattaacggttttctacaagaaaatcaattgcttttcgaacttttaaatcttctttcatcgcgtcagttgaaccgattgcctgcttaatgttttcaaccggcatgttgtaagcttcagccattttagtcagctcagcttcaacttcttcgtccgttacttcaaggttttctgcttgagcgatcgcttcaagagtcaggtttgattttacgcgttttgcggcatcttctttcatttgctcttttaacgcgttttcgtcttggcctgagaattgagtgtaaagctcaagattcatgccttgcatttgcagacgctgttcgaattctttcagcatgcggtcaagctcagtgtcgatcatcgcttgaggaacatcagcttcagcgttttcagatgctttcagaacaagctcttcacgcaatttagcgtcagcttcgttttcttttgcttcttcaaggcgtttttttgttttctcagttaattcagcaagcgtttcaacttcttcgtcaatgtcttttgcgaattcgtcgttaagctcaggaagctctttcgctttgatttcatgaattttcactttgaaaacagctggttttccggcaagctcttcagcgtggtactcttcagggaatgttacttcaacatccttttcagcgcctgcttcaaggcctgttaactgctcttcgaagcccgggatgaatgaacctgatcctacttcaagtgagtagttctcagcttttccgccttcaaacgcttcgccgtcaacgaaaccttcgaagtcaagaacgactgtatcgccgttttcaacagcgccttcttctttcacgacaagctcagcctgacgctcttgaagagctttaagttcgttttgtacatcttcgtcagtaacggcagtgtcatctttttcgattcctaagcctttgtaatcgccaagtttcacttccggttttacagtcacttttgcagtgaaaatcaagctttcgcctttttcgattttttcaacatcgatttcagggcggtctacaggctcaatgccggcttcttcaaccgctttagggtattctacaggaagtaaaatatctaaagcatcctggtaaagagcttcaacgccgaaacgctgttcgaataaaccgcggggaactttccctttgcggaatccaggaatagaaacctgttttactacttttttaaatgcatcatcaagagctgttttgaacgtatccgcatcaacttcaatcgttaatacgccttcgttgccttcttgtttttcccattttacagacatgtgtttccctccaaaaatctattcaggttgtgtcggtcttccattctaaagcaatccgcggctttgtcaaagaaaaaaccgctttgaatcagaatcattatgtaatgaactggcagcctgtccaaccgtaattctcatttcagttaaaccgctatacataaatacaaccactatattataacataacgcctaccgctttcaactatatggtgtgatttacaaataagaaatttcttcaatatccttaatcatcgtgcaggcttcttcaagttcgcggctgtcaaactcgtacatcatatgaagttcctccggctcaatgtcaatgccgtgcatctcgtaaccgaccttatgaagcgccgccgcccataaatctgcgttcaaaaacttcggcataaaagggtgcaggacgtacagatgccttctccacagctcctcgacggcagcgtataatgtagggttttcattgccgagcgtttcatcaagcacccggagaacgcgatgcaaaatcggagccgcatcaggctgaaccgtttcactcggaaccgcggtcattgaatcgccgaattttgtaatatggaccggcttgctgtagtcatgctccgccatcagcgtcaaaatcatcgttttgataagcggatgcgcgcctggatcttgaagaatcgtttttaagagacccgtgtattttgcaatattgcggtctttgagagaatgaatcagattcatttgttcagcggggctgttcagcactttttccgcatcaagaatgtcctcgtattcctcctcccacgcttcatcctgctggtcgggatcggtcattttgcggctgaattcgagcagccggtagaattgctccgcactttctgcgggcagctggttttcttccagcacagcttcaattgtgcttttgacttcttcatattgtttcagctgaattaaaatggtcatgtacacctgcagtacggtgaaataatggccgtacccttcattcagcattttctcgcaaacttgttttgcttcttccaattccccgagttccagaaaacaaatcgccatgcctaaatgtacgtcggactcggtatcgccgtggcttaccgcctctgagaacagttcgagggcctcctgatactgtttatccttcatggcggccatccctttatcaaccaagcgttctttcagacgggggaaaggaatgatatcagcttttttcttgtcatgcgtcatactttatttcctttcaggcgctatttttttcaagtgtatcaacacgcgtcaggaaacacaagaaaggatggtgcgcacggtaaaaaaagccgccggacagatccggtcggcttttttcaggcttgaagccatgaacttcttttcgattcaaactgctgaatgtcgtcctccagcagaagcgttaatgaaatttcatcataaccgttaatcagcatttccttccagtgcggatcgacttcaaatgaaatctcttttccttcactgtcgtgaatgagctggttttccaaatcaaccgtcatgttaagagactgattttcatattgaccggcgagttttttccactgatcatacggcatacggatgggaagcataccgtttttaaaacagttttgatgaaaaatatcggcaaatgacggagcaatgatgattttgaagccgtaatcatccagcgcccaaggagcgtgctcacgggatgatccgcagccgaaattctctccggcaattaatatggacgcgccttcatagactttgcgatttaattcaaattcaggatcaggctcaccgttctcaaggtatctccaatcaaaaaacgcgaatctgccgtatcctgttctttcaattcttttcaaaaactgtttcggaataatctggtccgtatcgacgttgatccggtttaagacggccgcttttcccgtatgcgtttttaaaggttccatcttttcgcgcactccttacacaactgttttttcttgataaaactttcttacatcgacgaaatgcccgtgaatggccgccattgccgccatcgccggactgacaaggtgtgttctcgcgccttttccctgtctgccttcgaagttgcggttggaagtggaagcgcatcgttccccttcaggcacgacatcattgttcatactgaggcacatgctgcagcctgattctctccattcaaatccggcctcgagaaacacgcggtgcagcccttcttcctcggcctgctgtttcacgctttgagaacccgggaccacaatggctctgacgctgtcagcgacttttcggcctttgatcatatccgcagcctggcgaagatcggtcatccgcgaatttgtacaggagccgataaacacatgctcgactttaatatcttcaattttttgattcggtgagattcccatgtattcgtacgcgcggatggcttcttttttaccgtcttcagaatcaatcgtttccggcgccggtatttgggcatcgaccggaagaaccatgccgggattgacgccccatgttaccattggagaaatctcgctgccgtctaacacgatggaatgatcgtatacggcgcccggatcggtttttaacgctttccattctgcggcggctttttcaaattcctcgccttttggcgcgtatttacggtttttacaatattcaatcgtcgtgtcatctggagcgatcagtcccgcccgtgctcccgcttctattgacatattgcagaccgtcatgcgttcgtccatagacatgtttctgaatacttccccggtgtattcaatgacatatccggtaccgaatttcaccccgtattttccgatgaccgacaagatgacatccttcgcggtcactcctttttggagcgttccgtcaacgcggatttcaagcgttttcggccgctgctgccatagtgtctgtgtggaaagaacatgctccacctcacttgtgccgataccgaaggcaagcgccccgaatgcaccgtgagtcgatgtatggctgtctccgcaaacgatcgttttccccggtagtgtcagaccaagctcaggcccgaccacgtgaacgatcccctggtctgcgctgtgaagatccgcaagacggacgccaaactcctcacaattccgttcaagcgcggttacttggcgctttgcgacttcatctttaatgtcaaaacggttgacggtcggaatattgtggtccatcgtcgcgaatgtattctgcggccgtctgacctttctccccttctgccttaacccttcaaacgcctgaggagacgtcacctcatgaatgaggtgcagatcaatatagagaaggtcgggttttccttcaccgctttttacaacatgccgatcccaaatcttttcgatgattgttcgaggcatcatctttgtttcctccctctacctatgaactaagaccgctttctttaaagcgtcacactatagattttgtattcgagccggctaatgcggcttttactttttcagtaatgtcatgcgttccggcatattggccgtcccgggcgatatcacgtgtacggctgccgtctgcaagcacctttgcgaccgctttttccaccgcctgcgcttcgttttcaagcccgaaagatgttctcaaaagcatcgccgctgataaaatcgccgcaaacggattggccatccctttaccggcgatgtcaggcgcagatccatgcacgggttcaaacaagtgaagacctgaacttgataagctggctgacggcagcatgccgagcgagcctgtcagcatggaggcttcatcgcttaaaatatcgccgaacatattctcagttacgacgacgtcaaactggctcggagcgtagatgagctgcatcgcggcattatcgacaagcatatgttcaagcgtcacatcaggaaattcttttgcgatttcatccgctgtttcccgccaaagcctgcttgatgaaagcacattcgccttatcaacggacgtcacttttccttttctgccggcagccatcttaaaagcttctctgacaacgcgtgcgatttcttctttcttataaaaaagggtatcgaccgcttccttttctcccgtttcattgacatactgtctgctcggttctccgaagtagaggccgcccgtcagttccctgacgattacaaagtcgacgccgctgatatattcttttttcagcggagacgcctcagacaggctttcaaatacggtcacgggacgcagattggcaaacaggccgagtttttttctgatgccgagcaggcctttttccggtctgagctccggaggattttggtcccatttcggcccgccgactgccccgagcaggatggcgtcggatctttcacaaagagccaccgtctcctcaggaagggggttttgatgggcgtcaatagccgctcccccgatcaccccgttttcaaattcaaattcatgtccgaattgttcggcaacgcttttcaatacatctgccgctgattccgccacttccggtccgattccgtcaccgggcagcaaagcaatacgttttttcaaatcaaacgttctcctttctattacgagccgaccgcagtctgtctctttaatccgtctaaattgcaatccagcaccagctgccggttcacggcgttcagataagctttagcagaagcttccagaacatcctgcgcgattccccgccctgatgtttcttttccgttcacggtcactctgacaaaaacttgagccagcgcgtcttcgcctttccggttggattggatgcggtagtctgtcagttcaatatttttatcgatgcagcgcccgagcgtattataaacggcttctacgctgcccgcccccgttgccgcctcttgcatcagctgttcgttttcctgatttttcaaagagactgttgcagtcggcacctgagacgtcccgtaatgcacttgcagagacaaaaattcatagccgatttttttgtctgtcactttttcttctaaaataagagaaatcaagtcatcatcggtgatttcttttttcttttcggtcagttctttaaacatcgtaaaatatttattgatttcatcactatcaaactggaatccaagcgtattcaggcggtctttgaacgcgtggcgcccggaatgctttccgagtacaagtgcatcagcagtcacgccgacaagttccggtgaaatgatttcatatgttgatttttctttcaggaaaccgtcttggtgaatgccggactcatgtgcgaaagcgttatctccgacgattgctttgttgcggggaactgccatacccgtcagtttgctgacaagatcactcgtccgcttcaattcatgaagattgagagatgaatcggcttgatgcgcgtcatttctgacatgaagcgcaacggcgatttcctctagcgcggcgttcccggctctttctcctatgccgttaatggcgcattcaatttgatcagcgccgttctcaattgccgaaagtgagttggcaaccgccattccgagatcatcgtggcaatgggctgagagctttacccggctgatattcggaacgtgttccttcatatatttaaagatgtttccgtattcagccggcgtcaggtaacctacagtgtccggcaggttgatgacgctcgcgccggcatcaatcactttttctacgatttcagccagaaactgaagttctgtgcggcatgcgtcttctgctgaccattgaacgatcggaaagcgttcttttgcatacttcaccatttcaaccgctttttccttaacctcttcccgcgtcattttcagcttatgcttcagatgaatgtcagaggtggcgataaagatgtgaatccgcgggctggccccgtctttcagcgcttcccaggctgcgtcgatgtcacctttgacagatcgggcaagccctgttaccgaacaatttttaatcgttcttgcgatttcctgcacagctaaaaaatcacctcgggatgaagcgggaaatcccgcttcaataatgtccaccccgagtctttcaagctgcttggctatcgccagtttctcccgggaattgaggttgaccccgggggattgttcaccgtcacgaagggtcgtgtcgaaaacattaattttgcgcaacggagaccaccgcttccttctttttgccttgtttaacaaacggcatcatttcacgaagctgtctgccgaccttttcaatctgatgctcgttttcgcttgcattgatcgcattgaagcgaggacggttcacttggttttccacgatccattctttcgcgaatgtaccgttttgaatatccgttaatacttgtttcatcgattcttttaccttcgcatcgactacgcgcggccctgatacaaaatctccccattgagccgtatcggagatagagtatctcatgcccgccaagccttcttcatacatcaagtctacgatcagcttcagttcgtgcagacactcgaagtatgcgagttcaggctggtagccggcttctgtcagcgtttcaaaacccgctttgacaagcgccgttaaacctccgcacagaacagcctgctcaccgaacaaatccgtttctgtttcttccttaaatgttgtttcaagaacccctgcacgcgctccgccgattccttttgcataagcaagagccgtatctttcgcttcgcctgatacatcctggtagatggcaaacaatgccggtacgcccgcgccttgttcatatgttcttctgacaaggtgtcccggccctttaggagcgacaaggaatacatccacatcagcaggaggcacgatctgatggaaatggacgttaaatccgtgtgcgaataccaatgacttgcccgccgtcaattcatctttgatttcagcttcatatactttttgctgctgttcatccggaagaagaaccataatgatatcagcctgggcagccgcttctcttaccgaaaagactttatgaccgtcttcttgggcctgtgtaaatgattttccttgtctgacgccgacaatgacatcaattccgctttcttttaagttcagcgcgtgtgcgtgaccttgtgaaccgtaaccgataatcgctacttttttacccgccaatacgttctctttgatatcaccgttataatatacttttaccattttaatctctcccttttttgtgttatacaattgaaattgttttattggatgacgccttctgctgagttcccctcgcaaaagccgttgtgcccgttctcgcgatttctttaattccgtaaggtttgagaagctctatgagcgcttcgattttattagattcgccggtaacctgaacgacgatgctgtctcttgagacatcaacgacggaagctctgaacggctcaatgattccattgatttccgttctggccgacggtgcggaaacaactttgattaatgccagctcacgctgtacaatcgattggtttgtaatatccgtcactttcaggacgtcaatttgtttgttaagctgctttgtcagctgctctacgtcattttcgccttccacatggacgacaaatgtaatccttgaaacaccgcttgtttccgtgtggcctacagtgatgctttcgatattatagtgtctttttgtaaacaggccggtgatccggtttaatactcccgagcggttgaccaccgttaatgtgataatgcgtttcaaggtttcacccccaccatttcatgaagtcctttacccggcgcaatcatcgggaatactttttcgcttttggcgacccggacgtcaataacggccggttcttttgatgaaagcgcctttttaagctcttcttccgcctcttcttccgatgaaatccggacgcctttaatgccgtaggcttctgacaatttgacaaagtcaggctgcgccgaaaatttggattcagaatagcgttcttcatagaagatttcctgccactgtcggaccatgcccagacattcgttgttcaagataaccactttgacaggaagattcagctgccggatgacatctaattcctgaagggtcatctgaaaaccgccgtctccgaggatggcaacgaccgtggcgttacgatcggccagctgcgctccgatagccgccggaaggccgaagcccattgtgccgagtccccccgaggtaacccacttatcagcctttcggaaaggataaaactgagccgcccacatctggtgctggccgacatccgtcgccacaattgcctcaccgtttgtgaattggtgaatatactcaatcagcttttggggtttcaagccctcttctctgttgtctgtataccaaagcggatattcttctttccattctgaaagctgctgtttccattcctctgtctgtccctgttttccgttttgcttcaataattcctgaaggacgattttactgtcgccgaccaccggaatctgcgtttcgataatttttccgatttcagcaggatcaatatcgatatgcgccactttggccgattttgcaaaatgcttcagatttccggtcacgcgatcatcgaaccgcgctccgatgctgatcaacaagtcacagtggtaaagcgccatattcgctgtgtatgtgccgtgcatccccgccattcccagaaaaagaggatggtctgccgggaaaccgcccagaccgaggagcgtgtgcgctaccggaatttgctgctgttcggcataattttttaaatcttctgaagctttaccgtgcaaaacacccgctccggctaaaataaccggctttttcgcactgctgacagcttccacgagctttcggatctgcagatagttaggctcttttacaggctgataacccggaaggctgatctcgtgatcatatctgaactctccttcaaatgctgcgacatccttcggtatatcaattaataccggacccggtcttcccgtcgtggcgatatggaacgcctctttaatcacacgggggagatcttccggacggcggacttggtagctgtgtttcgtaatcggcatcgtaattcctaaaatgtcggcttcctggaaagcgtcgctgccgatgaccgaagtggccacctgaccggtaaacactacgagcggcaatgaatctatcatcgcatccgcaagaccggtaactaaatttgtcgctccgggtcctgaggtagcaatcacaacccccggctttccggagactctcgcatacccttctgccgcatgaatcgcgccttgctcgtggcggggcaggatgtgaaccaatcctgattgatacagtttatcgtaaatcggaaggacggctccccccggatagccgaagatcatctcgacattttctttctttaatgattcaatcagcatcagagccccgttcattgtttttgtacattcggcagacaaagaatccgcctgtacatttgtgcccattttcagttcctccttttcaatgttcccttctaaaatccaattcataaaacgcagcgccggctgacgcaaataaaaaagccttcccacccacattcagccaagcatttcatgcgatagccaaaaggggcgaaaaggctttgctttccgcggtaccacccttgtttacggtcatatgcagaccgtctcatggataatgattatccgttttgataacgagtaaacattgtgttcactcggccgagtcctactctttacatttcagaccggcactctgaggggagttcactttgatttgttttaccggctctcagcgttaccggctctctgtgaaaaacttcagcaaagctacttatcctcttctgcgctttttattatggcagctcttttattgaaaaagaaccttcatttgtttgttttttcagtgttttatgatttttctttttagcgtgaatcatttatttatttttgtttgaactcatattacgcccgtttgcaggcagtgtcaacagcatttttataattattagacaatttagattaatcaatctactttgtatacgctttcattactggtacaaagggatctgtaaatattaaaagtttttatcatttttttattaatctctcaagattacatgaaatttttccgttcatatacgaatatgtcacattttattacacgatttttctctgtccttccggcatgcttgtcagatattccgttcgattgaacaggctctttatacagacatacgcatacactgttcttatctcgtaagaaatgagtgatgtcatgaataagatgttatcaggcatgcagggcctgcctcctggatttccgcctttaccggtcttaccgccgcagtcttattatcctccggccccgatgcatacagcaccatatcaaggcggcccttcttttcagcagggattcccgtcatccggatacggacagcagaccccgcaaagcacgctgtcattcgccgggcagcaattcgtcccatacccttatacaaccgggtactacggccaatccttcagtgacgtcggcggaagcctcggcgccggggcgcatcccggcgcgctcgggggcggtttcagcggccatgccgggggcttcagcgctccgagcggattcagatgatacaaaaaccggtctcacacggccggtttcttttcatattcacagggtataacggtcattccattgattcatttcctgctccgtatagtaatcagcccttgaaacctcaacaatgattaaaccgcattgagtgattaaaaattgcttcagttcctcaaacagctcgtcttttccgcaaaagatcgtttctatatggtgatttttatatgcaaatgcgtacttcaaaagctaattcctcccgctgtctttctatcattcattgacaaaatgcatgatagaaattagaaaatttatcactcaagggcgccttaagtatatttatacatatatttattacggtaaatattacattaagtttcatttatattaaaattactttacaattttcatcaaatacggaacttttgtttcgtaaaataaaaataaaatacaaaaaaacctcaaacccattgtcagggcttgaggttttttatacgtcccaggagagattcgaactcccgaccgacggcttagaaggccgttgctctatccggctgagctactgggacataactattccttcgtattcatgtataacggtcatttttcgaacttggaccgattgacttactaactattatatttgtacaggtttcaaaattcaataatataaaataaataattcatgtacttgaagtttatggcatattaattaattgtccatatgcttatccctccctcgtgaaaatgagaattcagattaccctcaactaatcaaaagaaagagacccctacgaggagtctccaaactataatacaggtagcaaaattgctttaagtctatcacctttaggctttctgccatacgagaatttgaatctattagctgttattaaggttgcataggctaatttttgctctaaacttaactcttgttttggaattaatactgttacatcactgttaggtacaaaagattcgattgatacataagagtaggtgtggctccctgcaccgttagtcgaaacgtagatagttcctgctgggaaaactttattcttgggaactgtgtgaatatcaacataacctgtataactcgtggattgccattttgaaggtctaatatacggaataaggtattcatttgctttttcaggctgaatagctaaattactggatgcaactccgttatatatatgaaagatatcttgtaacattttaaagttgctttcatcctgatttcttaaaacctctccaatcgaccttaccttattatttaagactttaaactgtctaattccagtgctgtcatcaatactataatctaatattgcaggaggaatttctgttatatcaggaattaacaactgagccaaagttcgattaacttgtcttccatagctgaatttgaacttattcattgacaatgcagtgcagtagtatagtaggacagactttgacatgtttactttcggtttcaaataaaacaaatctcttcctgagtaataaggaaactcttgtaaaaagcttgacataacactccctcccccagcaaccgaaatagtcattggcgggtttggagatatactagttctttcaacgaaagcagtaacaccattatgttttccactacgacccacgtaaggaatggcatttggagaatttattgaaacttcttctagcttattcaggtctaaattcacgccatattttacttcaaataactcttccacacgaactaacttcataggccattctccatcttaaatgcctgatacttacgaactgtcttttcaaatgctctcatatctagggaactataatcagtttctaaatatgcttcagcaatccattcatcttctggagtaactatcttgtttatactgaattcagctatttcctttctattcgtaaaagcatttaaccattgccgctctaaccctttttcgccgtcccactgtctgtttacatctgcacgcccgtacttcttagtttttacaaagccatcatttctccaatatccgaaccatgtttctttatacttagaatgcggaacatgagcggtgattacaattcctacagttactacagatgttttactattagcaaacaactcctcaggtaaagatacaacggcttcaagggtatgatttttaagtaaacgttttttgtactcgtaatttgcacctgatgtatctgtaactacacttgcaggaaccaatgcaataactgttcccttttcttttacagcatctaaattagaaaaaataaattcgaattcataaacatcatctttatccatcttgaaaggcggattaagaagaccaacgtcaattaattttttcccttttagcttaataggaaccacgtcaaaagtatcaccccaaataatgttacttcgaccatctgaatgtataatcatattcgaaaccagcaatgctaaattacttgattcgtattcaattccataaacttgtttttcacgtatttcttcaatttttgtttcgtcatcacctgcatcaatcatcatttcacctagtgaagccactaagaagccacctgtacctgctgcattatcaagtacagtggtatctcttcttacattagccattttagcgaacaattgtgcaatgtgcataggcgtaagtacaatgcccaatcccttatctgtatttgcatagcgtaaaaactctatatagaactgacttagtgtatcaatgtatttatatttgtctaaaaacgtatagacgttatccttaattgatgttataacttctgttaatgccatcaatccttttttactatcggagaaagtcttatttgttttgataaaatcaaatgcccctaatactacgtctgtatttttatccttctttgggtcagctcgtaactcaaccgaaatcgcacctaataaagacgaaattaaggcattggccgtcttatgagtattatatgatattctaaaagcatcgttttgcaaggcgaccaagattccagagataagcaaagctcgataggattctttgatttttttcttatgaagattgctattcaatgactttgcataagtaagcagttttgaatagtctctatgaaaggcatcatcggattccaaaattaaccttaggtaattatcataagtcaatagattctccgactttacttcttggacttcatcggttccctttaactgccaaaatgcacttacttcataattgtcttcacttccacttaaagcaatggataatacatcgaattcttttgaaacaaaagaagagtatagtaacactccgtcaactgcataatcggcatacttttctcttgttacactgctatgaaatttggtgtccgctttacattctacaaggaaaataatatcagggtacctataagaccttagaataaagtctggtatcccctgtcttgtcccttttttactagcattcgaaagcaatttttttattttttcattagctgtcgcatctttaaattcaacaataatatcttcattatcgaaataacctttttcttgaagtaaatctttgaaaagccattcagtttcagtttctgatatttttcttttagccatatttgcacacccttaatttacacatttatattaataaatttccgacaaaggtaatcttactatagaatgcatgttagttgaatgacttttcgacaaacacccataattgtattacccctcccttacagatgctgcggcgtatactattaacaaagtgctccccataggcaaaaatccctctagctcagtgttaccaatacatctgaggtttgaggaaatttattttttctttacaaggtgttaatcagagaaacatgcgaattaacttgttacaaggctctgctcaaacttacctttctgtataatgaaattactggtctttgctgctcacacgaacataaccaaatctcttgatttgcatgtcttcctctatctttcgattaatttactatcactgttcgcatatacccttattacttaaggtctagtaaagagagtaaaacattaacatcatgctctgttgccccttccttaaccttttggtcaacctttatattaactgtcttccagaactttacttgaatccaaccgttatcaaagcagcgagaaaggaatgccttaagacacttcaaccttgttaatttggtctgattactaacatccatgctgtccaaccatttataaatagcggccgtgatatctcctacatactgaagattggttatactttggaaatgcgtaacgtgaagcacataatcacttatagtacggcttctattgccacttaccttcatttgcctcgtaataatgtctattgaatcagaaattaacttagaatcaccatgtgccttatgctgttttattttcgattctgaagtagcggggctcaaaacattcatttcatttaaaagtcctctaacatcaattccaacatcaaacaatcctgttcttttagtcaaaataaaaaacctcctataccgaaatgatataagccaataaacagtgtaatttcttacatgaccgttatactgaccgtttcattaaacgatttagaaggttgaaatatcgcactttatatgtagcattgggtacgtcccaggagagattcgaactcccgaccgacggcttagaaggccgttgctctatccggctgagctactgggacatgaaaaacaaattgttctgctgatcattttaccatgatatcagcgaattgacaatatagtcatccgataaaaaaggccagcggcatcagttttcactctgatgtcaccagctctttttttgtacgtcccaggagagattcgaactcccgaccgacggcttagaaggccgttgctctatccagctgagctactgggacagcttttactttatgtatcagcgacaagattcattatatacaggttcaaatcataagtcaatatttttttaaaacttttgatggggaagaatgaaatctcccccatcacttgttaaaaactgattgtattcccaaagtccttcaattcccgacccgtttcgtcgtaaaatgtcacggcgccttctctttctgtaagagtaagaatggcatagcttttcacattgcggactctcggaagacggatgctgcccggattgatcaaaagcttgccccgaagcacttcactcccggcaatatgtgaatggccgaagcagacgatatccgccccaagctcttccgcccggtaaaaaacagttaaaagtgactgtttaatgccgtgaagatgcccgtgaacggccagaattttctttgaacctgcgtccagaaggagttcatcctgaaacccgccgccaaagtcgcaattgcctttcaccgtgtgatacggcgtgagcgccggatgtgcggcgtcaagctctgaatcaccgcaatgaatcatcagatccgcttcgtcttcgtgccgctttgcaatcgtctccagctcgtcttcaaggccgtgactgtcacttattatcagcactttcattgcatacgctcccccttatgaatcaagcagctttgacagtttcttgagcgcctcagccctgtggctgattttgtttttctcagcgcttgtcagctgggccatggttttatctttatcttttacaataaaaatgggatcatagccgaacccgttatctccttcgggtccttccgcaatatacccttcaacatgaccttcgaccgtttttgtttcctgccccggcatgctgacggcaagggcgcagcggaaacgggccgtgcgctgctctttttcgatgccttttaattctgacagcaccttgtccatattcgccttatcatcttttgcttctccggcataacgggctgaataaacgcccggtctgcctccaaggttgtccaccgataaaccggagtcgtctgcaatgaccattttgtttacggcttttgccacggcttccgcttttaagatggcgttttcttcaaaggtatgtccggtttcctcaatttcttccgtaaatccgatttccgccaaagaagagacgctgtagcctttcggttcgagtatttccttgaattctttcacttttccctgattgtgtgtcgcaataatggcttctttcacggtgatcaggcctctctttcttatttcagttcaggcaatgtttctcccagcacttctttttgcttttgaataagcgtctggattcctttttcggcaaggcttaacagtccgtttaaatcttcacgggagaatgtggcttcttcgcccgtcccttgaagctctacaaaacgtccgcttcccgtcatgataatattcatgtcgacttcagccgccgaatcctcttcataattcagatccaaaagaaggctttcttctttatccatcccgacagaaatggctgcgagataatctgtcacaggagaggttttgataacgccgctttttacgagtttgccaatcgcaatggccattgccaagaaggcgccggtaatggaagccgttcttgttccgccgtcagcttgaatgacgtcacagtcgatccagatcgtccgttcgccgagcttctccaaatcaacgacggcccggagcgcgcgcccgatcagccgctgaatttccatcgttctgccggagacctttccttttgaagattctcttatcgttctttgattcgtcgcgcggggaagcatgctgtattccgctgtgatccagccttttcctccgccgcgtaaaaatggcggcacccgatcttccacagatgcattacagatgaccttcgtatttcccgctgtaattaaaacagagccttccgggtgagtgataaaatccaaatcaaatgtgatagggcgcagctcatcgtgctgtcttccgtcgtgtctcatattttacctccgattatatgtacataaaccttttgttccggattgtgaataaagaaagaggcagccggaacgctaacctcttttttactagtatatcaaaaatcgcaaattaaaaactacccgtattcacttgtgacggcctcgaaacaggttttgaaagggattctcctttctcattcaccagttctgattttccgtttacttttatagaaacacttttgatcgacggctgttcggttaatgtgagaacgatgctgtccagtacgcccgatgataccatttttgttttttcgtcggcgcttccgtaaatggagctgttaaagtccagtgtaacctggccgtctttcactttcggcttgccgagaagcttaacatcgttattaaagtccgtcaaaagcccgcttgctttgcccggtccgtcggcgagctgttcaacggcggcggtgatgtcatctgtttccgaattgtcaatccgctttgtgacaggtacgtagtattcgcttgtctctgtttccgccagataatagacagtcagcggatgggtgtctgtcagatcattcactccggccgtttcaatattaatcccatcttttctgcttaagtcgcccgtaatcggcgtaccgcccacaggcatttctttcagttcgtgcccgttgattctgattttgactttatctattgagctgaattgggtaagcgtccatgtaatcgattgcaggattttttgttcgtcttcttttttatagtttttaaattccttcgaaaaatcagcgacggcagtgccgtcttttttaatatcgacatttaccgtcgtatccgcagggagcaccgctctgaagccgttcggcaggatttctgacacaggccccccctgaaccaaatactcaagggcctgctttgcggttccctcactgttcggaagaggcagtgtctgtgctgcgacatagccgtttttatcaatcagatacagctctcgcatgactgtattggccggctggtcggctttagaagtgccgtttttctctgactgctttggttttgcctgaattcccgcttcatcctttacatatgaaatgtcttgaggcgggtcaatttccccggctgttttatcggattgaaacaaaccgcatccagataacacaaaagccgaagtaagacatgttgcagcaatgactgcaggtccttttttcagcatacttttccctcctaaagctgtttgtactatgatgtatacgagccctgtccgggaaatagaccgggaagcgcaaaaaaacccgccgtaaacagcgggtttttttgatttattttctgaccggctcttgaagggaaatgcactcgacatggccgatttcgtggccgaaccagtcttcggcaatttttgcgaaaccgttccgctcccccgttgtaagaaattgatgctccggtgcatgtttcgattggtttaacaaacctttataagacaagatggtgctcacttctctcgccgtctcgtctccggaggaaatgattttcacttgctctcccatatagttctgaatcggatcttttaaaatcggataatgcgtacatcctaaaatcaaggtgtcaattgatgtaccttttaaaggctcaagcgatgcttcaaccgcttcctccgctgattcctgaagaaaccgtccgctttccacaaacggcacgagcagcggacaagccgtgttctcaacttgaagttctgcgtttaacccgagcagcgcctgctcatacgctctgcttttaatggtattgaccgtgccgatgacaccgatatgctggtttttcgtgacctttatcgccgttctcgcacccggctgaatgacgccgacaaccggaatatccgttttgcgctgaatatcctccaaggcaatggccgtggccgtattgcaggcgatcacgagcattttgatatggtggttttccagcaggtaatcggtcatttcccacgtgtattgaaggacttcttcttcaggacgcgggccgtacgggcagcgttttgtatctcccacatagatgatattttccttcggtagctgtctcatgatttccttagcaacggttaacccgccaaccccggaatcaatgactcctatcggctgttccaacaaaatcgcctcattttcttttcatttcatgctgcagtttcaataatgatttttcgaaagcggctgtttcttcttcggaaaatgtcgcaaacatatcccgcaaataagcctgtcttttcaaaatcacttcttggataatgcgctctccttcagcgagaagatgaattctgacgacccgtctgtcagccgggtctttcacccgctcgacaagcttatttttttccatgcggtctatcagatccgtcgtcgtgctgcaagccaaatacattttgcctgataattcgcctattgtcatatcccccaattcataaagccattgaagccccacgaattgcggcggtgtaattgcatattggttaaggatttctcttcctttttgtttaatgatcgcagcgatatggcggagtgatttttcgatatccgcaacatgctctacagattttgatgtcatttgtccatccctcactcaaggatctttctgggctatgcgctccgtgtctattttccttctttttttaagaaaatgcaagactgacagagaaaaaggaaaaaccgggattttcaccgcatgcccatcagcccgggcgccaacgcaaataaccggctccttctcgaaaagaaggaaaaccggcaagaatcagagctctagctcacccattctaagaagctcgacaacagcttgcgaacgccctttcacacctaacttctgcatggcatttgaaatgtgattccgtacagttttttcactgataaatagctcgcttgcaatttcctttgttgtcttgtcttgaacgagcaattcgaatacttctctttctcttttggtcagcagcggctttgattgaaaatctttctccttcaagtattgtaaccctccttgctaaggtgagagcgaatctgaaacgaatgggtttatatagtcaagatatcatatgtaaagggcgcttcggaggtgacgtctcttagagaaatagttatccgttcaggcgagcagaatgcctttctcccgctccgtccagctgaccgctttgccgcttttctttgacacttgaaccataacgacggaacctgtaaagcacggcagacccgactcattttctccaagataatgaagggtgacggacgcatttccggcagcgcttgctttcacataaatccgcagattttcatacggcatcacctgacgcatatagtcgcactgctggcttgcgacgaccgtcatcgtttccgagttttgcgccgttatgcctcgctgtttaaaataagcgatccgcgcttcttcaaaatagatgaaaggggttacattattcatatggccgaacatatccgtttctgaaaaacgaaccgatacttcagtaaagaaagaaaacgactgtctccattcttcaaacgggatatcaatatattgcggttgtttcatcaccttcagctccttataaaaaaacctctcccgtgcgcggaagaggctctttttctctttcttatactctgtcgcttccgaagaaattacggaatgcttgtaaattggtatctctgttcaaagcagcgattgaagtcgtaagcggaatgcctttcgggcaggattgaacacagttttgtgaattcccgcaatctccgaggccgccgtctgtcattaacgcttctaaacgttctgctttgttcatcgcgcccgtcggatgggcgttaaacagacgcacttgcgacatcggggcaggccccatgaatttcgacttgctgttgacgttcgggcaggcttcgaggcagacgccgcatgtcatgcatttagacaattcatatgcccactggcggcgtttttccggcattctcggcccaggccccaaatcataagttccatcaatcggcacccatgctttcacttttttcagtgaatcaaacattctgctgcggtcaacctgaaggtcacggacaaccgggaatgttttcatcggcttcagacggatcggctgttccagcttatcaatcagcgccgtgcatgactggcgcggtcttccgttgatgaccatggagcaggcgccgcatacttcttcaagacagttcatgtcccatgcgaccggagtggttttctctccttttgcattcacgggatttctgcggatttccatcagggcggaaatcacgttcagattcgggcggtaattgatttcgaattcttcatcgtatggcgcgctttcgggcgtatcctgacgtgtaatgataaaccgtatctttttctcactcatgattatttcgccaccttcttcttcgagtagtcgcgtttacggggcgcaatcagtgatacatcgacatcctgatattcaaattccggagcttcaaacggaccggcatgtttcgccatcgtcgttttgagccactcatcgtcatttctttcagggaaatccggtttatagtgcgctccccggctttcatttcggttatatgcgccgagcgtgataactctggcaagctgaagcatattggagaactggcgggtgaacatcgccccttggttgctccattttgtcgtatcgttgatattgattttcttaaagcgttccatcagctcttggattttgtcatccgttttcaaaagcttatcgttgtggcggaccaccgtgacgttggccgtcatccattctccgagctcacggtgaagcacgtaggcattttcgtcgccgtccatcttcatgatatcggcccatttttcttcttcttttttcacataggaatcaaataatgaagaagacaggtcttccgctgatgtttcaagtccggaaacatatttcaccgcattcggtccggccaccattcctccgtagatggcggaaagcagagagttcgcccctaaacggtttcctccgtgcattgaataatcacattctcccgctgcgaacagtccgcggatgcttgtcatctgatcataatcaacccacagtccgcccattgaatagtgaacggcagggaaaattttcatcggaagcttgcgcgggtcatcgcccatgaatttttcatagatttcgataatgccgccaagcttaacgtcaagctctttcggatctttgtgcgacagatcgagatacaccatgttttctccgttgatgccgagtttctgattcacgcacacgtcaaagatttcacgtgtcgcaatatcccgcggcacgaggtttccgtaagccggatatttttcctcaaggaagtaccaaggttttccgtctttatacgtccagactcttccgccctcgccgcgcgccgattcactcatcagacgcagtttatcgtcccccgggattgctgtcgggtgaatttggataaattcgccgtttgcataataagcgccctgctgataaacgattgatgcggcagatcccgtgttgatcatgctgtttgttgattttccgaatacgattccgggtcctccagtcgccataataacggcgtcagaacggaatgactcgatttgcatattggtcagattttgggctacgataccgcggcacgtgcgctcatcgtcaagaacggcgccgaggaattcccagccttcatattttgtgacgagacccgccacttcatatctgcgcacctgctcgtccagtgcgtaaagaagctgctgacccgtcgtcgctcccgcgtaagcggttctgtgatgctgtgtacccccgaaacggcggaagtccaagagcccttccggcgttctgttaaacataacccccatgcggtccaataagtggataatggacggcgccgcttcacacatcgcttttacaggaggctggtttgccaaaaagtcgcctccgtataccgtgtcatcaaaatgctcaaacggagagtctccttccccttttgtgttgacagctccgtttatcccgccctgcgcgcagaccgagtgagagcgtttgaccggaacgatggaaaacaatttaacggccgtgcctgattccgctgctttaattgtcgccatgaggccggcaagacccccgccgactacgataatgcttgattgactcatgatagcccctctccctctagtaatctagttctcttacacaaacgcaaaaatcgcttttaaacctacgtatgaaagcgctaaaaatataatcagcgtcacgtaagtcgaaattctttgagaacgcggcgtgaccgtgatcccccatgtgaccgcaaaagaccataagccgtttgaaaagtgaaaaatgaccgataaaacgcctacaatgtaaaaaccgagcataaacggcgagctcaaaatattcgccatcatatcgaagttgacttcagcgcccatctgcgcggcaatccgcgtctgccatacatgccagctgacgaaaataagggtgagaataccagtgacacgctgaagcacaaacatccagtttctgaaataactgtagtggccagcgttgtttttcgcagtaaatgctatgtacacaccgtaaaccgcatgataaattaaaggtaagaaaataataaaaatttctaacgcatacctgaacggcagactgtccataaagccggccgccttgttaaacgcatccgctccccttgcggcaaattggttgacgactaaatgctggatcaaaaagatgccgaccggaataacaccgagcaaggaatgcaatcttcgaaaataaaactctctgttcccagacattactttaccccctgtttgatttaagtgcgaaatgtactaaaatctctgcccccacttcgtttcaattgtaagcactttattaaaatttattgacaatttcattttactcctccctcaaaagggcgtcaagaaaacgtgtacataaattataattttcggaattgattatctggagggaaaattttattttcctgcgatatctttctcacattttttcgcgtgttttataggatcatcctgtaatcctcccccctgtttaagctataataaacgaaggagagaggggaatacataatatgaagaataattatgaagcagctttagaacctttaactgaactcgacgtcagcgcatacggctacgaattaatccgggaaatcgtgcttccggatatcctcggcccggagcattcatcgatgatgtattgggcgggaaaacgcctcgcccgcaaatttcctcttcaatcgtgggaagaaatccccgccttttttgaaaaagccggctggggaactttgacaaacgcaggatcgaaaaaacaagaactggaatttgaactggaaggaccgctcgtatccagcaggctcaaacatcagaaagagccttgttttcagcttgaagccggttttatagccgaacagattcaattgatgaacgatcagattgcagaatcttatgaacaggtaaaaaagagagcggataaagtcgtcctgactgtaaaatgggatatgaaggaccctgtataattgaaaaaaggcggtgactccaagtcccgcctttttgcctgcccgtttatacggcagacggctgtttagaaagctcaaacgcatcatgaagcgcttcgaccgctttcaccatatcattttcgctgacaaccgctgatacttttatttcagatgtgcttaccattttgacttgtacatttttttccgccagtacggcaaacatgtccgcggcgacgccgggattcgaaaccatgcccgacccgacaatggagactttcgccagttttctttcggtttcaattttttcatagtcaagcgcgtttttatattcttcaagcacggcgaccgtttgcgcggcatcttccgttttcactgagaaagaaatatccgcttccccatcgtccgactgtgtctgaataataatgtcaacgttgatgtttcgttttgccagcgcggtgaagattgttgaaagtgttgtcaatccgcttgcaaggcccgtaacggacaccctcgtgatctggtcttcaaatgcaattcctctgacgattaaattctgctccattgatgattcctcctcaattaatgttcccgcttcatgttccgtacttgaccgcacttctaaaggcacttggtagtttttcgcgaactcaaccgcccgcgggtgaagaacacccgctcctagatttgcaagctccagcatttcatcataagaaattcccgccagttttctcgctgaccggacataccgcggatctgtcgtaaatacgcccggaacatctgtataaatgtcgcatttatccgcttccagcgctgcggcaagagcgaccgccgtcgtatcggaaccgccccgtccgagcgtcgtgatgcctccgtcttccgttacgccctgaaaaccggcaacgactgtaatcctgccttctgcaagctgcgaacgaatcgccgtgatatcaatatccgtaattctcgcattgccgtgaacggcttccgtgcggacacccgcctgccagcccgtataagagacggcgtcatatcctttttcctgaagcgccatggccaaaagcgaaatcgtgacctgctctcccgtagacaaaagcatatccatctcgcgtctgcttggttcagatgtgatttcagccgcgaggttaacgagcgcgtcggttgattttcccattgccgaaacgacgactacgacgtcatggcctttttgcttttcagcaatggcgcgatttgcggcattttgaattttttcggcagagccgacggaagtgcctccgaatttttgtacgataagacccatactagaccaccctttacattttggttcgtgcgggtgaggagaaaagagcgttttgtccacaataaaaaaagcaatgagaggaatagctctcattgctttttcatatcattacgattgattatgaacaacgagatagccctccaagaaaatgaattcttgacagccttacatttatttaatgcaaggccagcgaatcacaccgatgggatgtgatacacttcggcgacgctcccctttcagcctttttcgcagaatccatcattctccaaaggcttactattgaagttcgcacctctatcttcaccatataacacgatcttatgaaattagttcacattctagcagatttttcagaaaagcacaatactatttttttaatttttcaaacagcagctgggccgccgcggccggcacacccgcttttttgatatcgtcaaggcttgcttccttcatctttttgacagatccgaaatgttttaagagcatttttttgcgtttttcgccgattccggggatatcatccagaacggattgaaaggcgctttttccccggatctgtctgtgaaagctgatcgcaaaacggtgaacttcgtcctgaatgcgctgaagcaggtaaaactcttggctgtttcgctccagaaacaccggttcaagcgggtcgccgatcaaaaggttggatgtccgatgtttatcatctttcgccaatcccgctaccgggacatcaaggccgagctcattctcgagcacgtcgcgcgccgcgttaatctgcccttttccgccgtcaatgatgattaaatccggcagcggaagattttcgcgaagcaccctcgtgtaccttcttctgacgacttccctcattgagccgtaatcatccggccctgttacggttttaattttatatttgcggtattcctttttattcggttttccgtcaataaagacaatcatggccgatacggggtttgtgccttgaatattggagttgtcaaacgcttcaatccgatgcggcgtgtaaatattcagcgcttcgccgagccgttcggctgcaccgattgaccgttcctcatcccgctcgattaacgaaaatttttcccgcagggcgattttcgcatttttgtgcgcaagcaaaagcagctcttttttcgggccttttttcggctgatgcacggcggtttccaacagctcggtgatcatgtccctgtcaacgctgtcaggcaccagaatttccttaggcagaaagtgattgtttttagagtagaactggccgatgaaggtcagaaattcttcatccgcttcctgatacatcggaaacatgctgacgtcacgttcgatcagttttccttggcgtatgaaaaagacttggacgcacatccagcctttatcgtaggcatatgcaaacacatcgcggtccagaaggtcattcatggtcattttttgcttctccatcgtcgattcgatgtgagcaagctggtcgcggaattctttagcccgttcaaattcaagcttttccgccgcttctgccattttcgcttcgagctcttttttgatttcgttatgccctccctttaaaaaacgggtaatgtcttcaacaatctcgcggtttgtctcctcagatatatcctttacacatggggcaaggcattgtccgagatgataatagagacagacgcggtccggaagctttgagcatttcctgagcgggtaaaggcggtccagcagttttttcgtttcccgcgccgcctgcacattcggatacgggccgaaatagcgtcctttgtcttttttgacattccgggtgacaatcagccgcggatggcgttcatgggtgattttaataaagggataggttttatcatctttcagcatgacattgtatttcggatcgtattttttaatcagattcatttccaaaataagcgcttcaagattggaggaagtcacgatatattcaaagtcctcaatctccgtcacaagccgttgggtttttgcgtcgtgagaaccggtgaaataagatcgcaccctgtttttcaagactttcgctttccccacgtagatgactgttttttgacggtctttcattaaataacagcccggctgatcgggaaggagggccagtttttctttcagttgtttattcatacgttacccttccttacattcatttctcgtgtccattcagtgtatcacgaacatttgtttttctccattctcagcttttggaagatcaaaaaaggcgattcccttcaaaggaatcgccctgccgtaacggaagctttcggcttacagatgtttgtttacaagctcttcaagagcttctttcggtttgaaaccgacagatgtttcaacgacttctccgtctttcaatacgagaagtgtcgggatgctcatgacgccgtatttaccggcagtttcttggttttcatccacgtcgattttgacgattttcagtttgtctcccatttcttgatcaagctcttcaagaacgggcgcgatcatcttacaaggtccgcaccaaggagcccagaaatcagccaatacgacaccttcacttgtttcagctgagaacgattgatcagttgcttttacgatagccattttgttattcctccaattgtcaaatgatgatttttagtatagcatctcccattcgttcatgctaatttaatgcttatattattttctcccgaacccgccggaaataatcttttttatacagtgtattataaccgggcggcaggcgttcaaaacttaagatggattcgcaggcagcgtgattaatacaatcgccatcggaggaagctccgcctcaagttttccgcccttttgagcaaacccggaaaacggcttcggtttgacgttttccggactgctgaatgtattgtgggcattcattttttccgcgtgaagaatcgttcccgaaggcttccctgtctttttcatgccccgcagttcaatcttcacatcagctttgtgcagatgatcgatattgcaaaggctgatatgtatgtctccgttttgctgtttggacgctgaaatgctgacttgcgggagccggccgtcattccattcgtacccggctgcttttgtttctgtcgccaaaagagaagcgtcctgatgcaccttaaacatatcaaacacatgatacgtcggcgtcaacagcatgtctttcccttctgtcaggatcattgcctgaagcacgttgacggtttgcgcgatattggccatctgtacgcggtctgcgtgctgatgaaaaatgtgaaaatgcgtggctgcgacaagggcgtcgcggatcgtattctgctgatacagaaagcccggattcgtgcctggctcaggatcaagccacgtgccccattcatcaatgatcagcccgactcttttttcgggatcgtactgatccatgatggcgctgtgccttgtgatcaattcatccatatgcgccgcttttttcatcgtgatgaaccattcatcttccgtaaactccgtcgctgatcctttccccttccagaaatcgcccggtattgtgtaataatgaaggctcagcccgtccatgagatcagcggcttttttcattaaagtttcagtccagcggtaatcatcgacattcgcgccgccggcaattttatagatttcattaccgctgtaattgcggacataggtttgaaagtttctgtaaaggtcggcataatactcaggatgcatgtttccgccgcagccccagttctcatttcctattccgaaatatgtcagcttccacggtttttcccgcccgttttcttttctccagtcggacatcggcgtgcccgcttcaaacgtcatgtattcaatccaatcagccatttctttaaccgttccgctgccgacgtttccggcgatgtacggttcgcagccgagcagttcacaaagcatcataaactcgtgcgtgccgaattcattggaatcaatcgtcccgccccaatgggtattcagcatggttttgcgtttccctacgccgtttgcccaatggtattcatctgcaaagcagccgcccggccatctgaggacgggaatctgaagctgtttgagggcggcggcgacatccgtcctgaccccgccggtattcggaatatcggaatcttttccgacccagatgccctcatatatgcctcttcccaggtgttccgcgaaatgtccgtatatgtttttattaatggttccccgtgtgatatcagtttgaatgactgccgtattgtgagacaaacttgatcattcctttcccttaataagaatgaaagcactacagccgatctatgtatctgggatgtatgctgagtggataagtttgtaagcgctttacaaaagcttattatattggttcgtacatgtcaatctcttattttatcaacctttaatttgtacgaaccaattaacacaaattaaaaccctctgacaaataagccagagggtttatgattatgaatgaatattggcatttttaaattcttgggtcagaagcggaaccacttcgaacaaatcgccgacaattccgtagtccgctattttaaatatttccgcttccgggtctttgttaatggcaacaatgaccttactatttgacatgcccgccaagtgctgaatcgctccggaaatgccgcaggcgatatacaaatccggcgtgacgacttttcccgtctggccgatttgaagggaataatcgcaatagtccgcgtcacacgcgccgcgtgaagcgcccaccgctgctccaagcacctcggcaagttcttttaacggttcaaatccatctttgctttttacaccgcggccgcctgctacgataattttcgcttctgataaatccacgccgtccgccgtttttttgactacttcttcaatgaccgtccgcaaatctgccggaggcgccgcaagctcttcgatatcacccgtccggctcgcgtctttttctaatgcctgaatattattcggacgaatcgtcgccaaaatgaacggatcggttgaaattacctgttcaaaggctttgccggaatagatcggtcttgtaaaaacgatgttgtctccggtaacgcttacatccgtgctgtctgaaatcagccccgtttcaaaccgggccgcaagcttaggtgacaaatcttttcccatagaagtgtggccgaaaataaccgcatcaggcttttcattttcgatcagatccccgagaaccgcggcatatccgtccgccgtatactgagaaagccccggcgaatcggccgtaaatactttgtcggcgccgtactgaatgagttctggtgctgcatcagctgcgccttttcccatcagcacgccgatgacatttcctccgccggaaatggttttgcctgcggctatggcttcaaaggtgacgttccgtaaggcgccgtcacgaatttctccgagtacgatcactttttttcccattctgacatcccccagtttctttaatatcggtttatacgactttggcttcttttctcagcagtgacacaagctctttcgcctgctcagcggcttctccttcgatcagtctgcccgcttctttttgcggcggcagaaaacgttcgatcgttttaagcttcggtgcggcatcatcttcatcaatgtcgaggtcatcgagctcaagttcttccagcggttttttcttcgccttcataatgcccggaagcgacggatagcgcggctcgtttaagccttgctgtgccgtgatgactaaaggaagtgaggttttaatgatttcggtatccccttcattgtctttctctgccacagcttcatcgccgctgattgtcagttttgtgatcgttgtgacgcaaggaatgttcagcagttcggcaagccttggagccacttggcctgaaccgccgtcaatcgcgacatttccgccgagaatcagatcatattcccggtccttgaaataatgatataagatagttgaaatggagtattggtcaggatcgctcagatcatcttcaatattgattaacaccgcctggtcacagcccatcgcaagggcggttctcagttctttctccgcatcttctccgccgacggttacggcggtaacggttccgccgtgctcttccttcagctgaatggcttcttcaatggcgtattcatcatatggattaatgataaattcggccccgtcctcctgaatctttcctgcttcaatgacgattttctcttctgtgtcaaacgtccgtttcatcagtacaaatagattcataatcttatcccctttatcttcgcccaccgaattgaggctttcttttttcgagaaatgcctgaatgccttcttttgcgtcatctgatgcaaatgcttccccaaaacgctttgcttcaagctttaagccgccgtcataagaatagatcttgtttgaataaaggagctcaagcagataagccatcgactgcgggcttttttccgcaaacttgcccgcgagcgttttcgcctttttcagcagctcttcctcatgttcggcgcctatcgtgacaagcccgaggctgagcgcttcttctccggtcacaggttctgaagtgccgatcatttcaagcgctttcgccgtaccgacgtaccggggaagtcgctgcgtcccggcaaagcccggaataatgccgagattcagctcgggcaggccgagctttgcatctaatgtagcgattctgatatggcaggccatggctagctcaagaccgcctccgagcgcagcaccgtgaatcgctgcgatcacgggcttcggaaacccttcaattctttccatcagctgctggcctttatccgccatggcagaagattgctcaagattttcaagcgacgtaaattcctttatatcggcgcccgccgagaaaaatttcccctcaccgcgaatgatgatgcttctgacgctgtcatctgtttcacatcggtcgaacagaccggacaactcatctaaaaccgcaccggacagcgcgttggccggctgatgattaatggtgatcaccgcaacagattgttctaccgccatcgaaaggctgttcatccgtcaaccccctttagttttgatgaattcctgacaccaacagctccaataccttgtctgacaaatccggaagatcatatttctgatcgttcatcacccatgttgtcactgtttcatctatcgtcccgaatatcatctgccgggcgaggcggacgtcgagattgtctttccattcccccgacttgattccttcggtcaaaatggtgtccagcatgtttaaataaccttttaaaatatcattgattttcaggcgcagcttgatatttgactgtctgagctcaagctgggtcacaatcgcgaggtggcggtcgttgccgagcagtgtgaaatgctgcttaataacgagagcgagtttttcttttgccgtcgttttttctttcacttcttcttccatgcgttcaatgaactggcccatcttttctttaaaaagagaaatgagtatatcctctttgtttttgaaatataaatagatggtgccgtccgcaacgccggcctgcttggcgattttggacacctgtgattggtgatagccgttttccgctatgacttctactgctgcatcaataatctgcatatactttggccgtttttggttcaatgtcatcgttccttccttcgataaatgaatgactattcattcataacttcatgataaaaaggaatccggattttgtcaagtttttcttttaaggcaccttgttttcacgggaagcatcttcctcttcgactaaacgccttcttaatatttttccgacggccgttttcggaagctcttttctgaattcgtaaagcttcgggactttgtacggcgcaagccgctctcttgcaaacgcatcaagctcatcggcatcggcctcggcgccttttttcaaaacgataaatgctttcaccgtttcccctctgtaggaatcagggacgcccgctacgacgatttcctgaacggcttcatgctcataaagcgcctcctccacctcccgggggtaaatgttgtatccgccggcaatgatgatgtcttttttcctgtcggcgatgtagaaaaatccttcctcatccatatatcccatatctccggtaaacagccagccgtctctgatgacacgcgccgtctcctcctgcttattccagtatcccttcatgacctgagggccttttacgatcagctcgccgtgttcatacggtcccgcaagcccgcctttttcttctgaatagattccggcatcggtattgggccagggacagccgatgctgccgggtttattttttccccaaatgaagtttgaatgggtaaccggtgatgcttcggataatccgtagccttccacaagctttcctccggtcactttttcaaatttctgtttgacctcaaccggcagcgccgctgaaccgctcggacagctttcaatggaggacaaatcatacttattcagctccgggtgatgcaacagcccgatgtaaatcgtcggtgccccgggaaaaaccgtcggcttcagcctgtcgattgttttcagggtatccaaaggattaaatttaggaagaaggatcatttcacatccctgcataatggaaaaattgagcacggcggtcaatccgtacacatgaaaaaaaggcacgatgccgagcaccttttcggctccctttttcattttgtacatccaggcggcgcacatttctgtattggcctgaatgttccggtgtgtgagcatgacgcctttcggatagccggttgttccgcccgtgtattgaagcacggcgatgtcatgcgcagggtcaatatcaaatggctccgcttcctccgctttttcgttttttaaaatatccgctaatttgtgaatttgttcgcatccgtcataatcaatttgaacctgttgtttttgcgtgagggtatacagcatatttttcggaaacggcaaaaaatcttttatactcgttgtaataatgcgttcgacgattgataacgttttcatttttatcaccttcgggaacagcatatcaagggtgatgatcacgcgcggcgcactgtctttcagctgatactcaagctcgtgttccgtgtagagaggattggtctgaacgacaatgccgccggcaaacaatacaccgtaaaaagcgatgaccgactgcggacaattgggcagcataatggcggctctgtcaccttttttcaggcctgttttgcgtaaaaaagcggctagctttaacgaatctgtgagaacgtcttggaatgtgagtttttttccgagaaaataaatggcggtatggttcgggaattgagctgcggagtttgtcagattggatggcagggtttgatcggtaaattcaagctcatgcggaatctcttcgggatattgagaaagccatggcttttcagactgcataatacctctcccttctgttttcctatacgttattattatagcagaagggtgattggaattggaaagcgtttcatgtgaaatttcgagtttcaggaggtgttgagcttgctggaaacgctgcattttgaagagggagttcctatcctgcgccagctgccgaagccgtttacgtcggccgcctttttgctccatccctttgtccggatgccggatgggtgggaagagcaaaagcgcacacggccttatgaacatatgtatccgagtgatgaggagatcatcgcgatgggcagacccacttcctggcaatccgtcatgaccgtttgcggattgcgctctgaaaaagagacagcgcttgcgcttatgactgctgccacggcacttcgggatgaatatgaacatcctgaatccgccaggctgtttaatcggcttcatcccgatctgtacttgccaagcgacgatgtcacttcaccatttttaattccgggacttttggatgtgttccgttcaaaaggcataaagcgctgcacttattatgagccggtcgaagagaaaggcataatttcactcaatcaaacggcggcttcggatgtatgcggactgctgcgggctgacatgatcattgccgacgaaaaacggcgcgccgcttttatgagcctatatgattcttttacgacactctttctcatggaagatcaagacatgccgtctgtcatccgcgccatgagttgggaagccgtcatttgctctgatacggcctgcataaactggtattctcaataaaaaaggccgccgattttagttcggcagccttttttcagtattaagatgtcatgaccagataaataagtccgatgaacagaaaaattcccgctgccgacagcagcactttcgcaagcttctccatttttccccgtccccttaaatcccggcggccaccacgaatgacaggccgactgagatgacaaatgaaataaagccgacagctctgttatctttttcaatttctttatcaattttaaaccggggcgtcagaaattcaaagataaaatagctgattaaaagcataataaatccgtatacgccccagccgatcatttgcaaaagcgaattatgctgggcgatgctgtgctgaaagacatttgcgataccgagaattttccctccggtcgccattgccaccgcaagattgcctttttggatttccacccagtttttataggatgtcaccaattcaaacacggtcagaaaaatgacgagacacaagaccgctacactgtaataagccgcgatttcaacaagctcattttcccaaaaagcattcatgacgtttactccctttttattttagttcgacaatcgttacgcctgatcctccttctcccgcttccccgaatcgcgagcttttcacgctgcggtggtttttcagaagatcctgcaccccttttcggagggcgcccgtgccttttccgtgaatgatggacactctcggatggccggcaagcaccgcgtcatctaaatatttttcgacgcggctgagggcgttttcgtaacgctctcccctgaggtcaagttcaagggatacgtgataatccttcccttttacggcggtgattgctttttcttttttcggttcaggagccgatttgagaaactcaagatctttttccttcaccttcattttgaggatgccgatttggacgttccattctttctcgccggttttttcaagcagcgcccctttttgtccgaatgtgagcacctttacttcgtcgcccggcttgagctcgcgttttttctctgtttttctttccggctgctttgatttttcaaaagccggcatcgcgtctccgagacgttttttggcgtcaatcagctcgtgttccttaaaggatctgtgttcttgcttgatggaccggagttcgcggatgatctgttcggcttcttttgcggcggcttccagtttttccgcagctttctgctcggcttcttccatcattttatctttttgggcgttcagctcaatgatttgctgctgaagctctttgtgcagtttttctgcttcttttctgattgattcggtttcagaaagctcttcatccgctctttttttgcttttttcaagggatgcgatcatcagatcgacttcgttatgttcggcggtcatttctgacttcgcctggccgatgatatgctccggaagcccaaggcgtcttgagatttcaaatgcgttgcttcggcccggcactccgatcagaagcttataggtaggcgaaagcgtttcaatgtcaaattcaacgctggcattcatgacgccttgtctgttatatccgtatgctttcagttccggataatgggttgtcgcaagcactctggcgtttgtccggtgaacttcgtcaaggatgctcatggcaagcgccgctccttcctgcggatctgttccggcaccgagttcatcaaacagcacaagactgttttcagacacgtcttttaaaatattgacgatattgaccatgtgggatgagaacgtactcagactttgttcgatcgactgttcatcgccgatatcggcaaacacattgtcaaatactgctgcttccgatccctcatcagccggtatgtgcaatcctgcctgcgccattatcgtcagcagcccgagtgtttttaacgtaacggttttaccgcccgtattcggtcccgtgatgacgatcgttgaataatctccgcccagttcaatatcgttggccacgacttgatcttggggcagcagcggatggcgcgcttttttcagccggataaaaccgtctccgttcatgagtggttttgtcgccttcatcgcttttgcgtatctcgctttggcgaaaatgaaatccagtgtctgcagcacttccacattttgagcgatttcttgtgtgtgttcagccgtatgctccgtcagcatccggagaatccgttcgatttcctgtttttcttttactttcgcctgctgaagcgagttgttcatatctacgatcgcctgcggttcaataaacagtgtcgcaccggatgaagatgtatcgtggacaattccgccgtagcttgatctgtattcctgtttgaccgggatgacaaagcggtcattccgaatcgtaacgatggtgtcagacagcattttagaagcggaagatgaacgcagcatcgattcaagccggtctctgactcttgattcaagcgtcctgagctgcgtgcggattccccttaaagcgggggatgcatgatcaagcacttcgccgtgatcatcaatgcaggagttaatctccctttccaaatcgcctaatgtaatcagttcttctgcatgggcttgtatcagcggaatgccgacgccgtcttctgtcatttggctgataaagtgcttcatttgtttaacggcatacagcagcccggacaattcggtgaattccgccggcgtcagcacactgccgatttccgcccgccgtaaagcggatcttatgtcggtcagaccgccgaacggagcatggcctctcaagcgcatgaccgcggatgcttcttcgacttcatccagctgtttttggatgtctgagagatccgtcaaaggtttcagctgcagaagcttctcccggccgagcgatgaggcggcatgtgcggtaatctgttcttttactttatgaaattcaagtgatgataacactttttgctgcacggttttgtgatcctccttacttaatcattgcgcgtcagaaatgctttgacctcgtgtagcggccgggcgtttaacacatgttttgtctccgtccaccctttgcgcgcagcggtcacgcccgttttcatatcatcgagcatctcgatattatgggcatcggtattaatgaccaaagtcacacctttttcatttgctttgatcagatgctcagtccgtaaatcgaggcgcgcggggtttgcattcagttcaagcgccgtatttgttttggcggcgagttcaatcagcatgtcgatgtcgacttcatagccggcccgtctgccgatcaggcgtcccgtcgggtgggcgataatgtccacgtgcttattcgtcagcgcctgttcaagccgtttcataatgacatgctccggctggctgaagcttgaatgaatagatgcgatgacaagatccatttcagacagaacactgtcatcataatcaagcgaaccgtcggggagaatgtccatctctacgcctttaaaaatatgaaaattttcaaattcagcatttaacgcgtcaatttcttccgcctgttttttgagccgttcggctgttaacccgttggctacctttaaatattgagaatggtcggtgatcgccatgtactgatagccttttgccatacacgcttctgccatttctctgatggaaaaagcgccgtcactccaggctgagtgcatgtggagatcgccttttatcgctttatgctccacaagatccgtttcttcccggtacgtgtcgacctcctgcccgctttctctgagctcaggaggaataaacggcagaccgaagtgggcgtaaaacgcttcttcgctcgggaatgttttgacgtctcccgtttctatggtttctactccgtattcactgatccgttcgccgcgctctttcgccagctggcgcattttaatgttgtgatctttagaaccggtaaaatgatgaagtgtggtggcaaactgttcctctgtcacaagccggaaatccacactcgtctcatattcaaaggtcaggatgactgatacttttgtatccccgctcgctatcacgtcttttacgttcgggagagaaagaagctgttctctgacagcctccggatgatctgtagcgataatgtaatccagatcttttacagtctcccgcgctcttctgagactgccggcccgggaatatttctgaatatccgtcagccgggccaaatgttcttcaattactgaagcaatgctgagcgcatagccgatcggaaaccgttccggctgttttccggcttctccgagagcctggaggattttctcctccgtttttttgccgaaaccggcgagcccctgtactttttgctgctcgcatgcttctttcagcgattccgcgtcatgaacgcccagttcctgatacagcttggcgatttttttgccgccgaggcccggaagcttcaaaagaggaaccaagcctttcggaacttctttctgcaattggagaagcgtgccggacacaccttcctgcatatattcacgaatgacgccgtaggtgccttttccgattccggataaagacatcatgtcgtcgatttccgacaggctgcggtcatcctgctcaagcgccgctgccgcttttcggaaggctgatattttaaacgggttgtcccctttcagttccatatagaccgcaatcgtttcaagcagcctgatgatatcttttttatgcatactcttaacccccagtcgtttcctgcttttcatcatacaaatttttctcctccggcacaactgacgcagagcttgaaaaaaacttctccggtcaagagaagttttttatgccccgtactgggcccacagttcttgcaggagccctgacagatacggcgtatgatgtgtgatgatatttgcaagcgtcgattgtgcgagcatatcctgaagcgcgcttaccggcagtacggatgcgacgtataacaggataaacgcaaataaatagacttccagaaacccaagcaccccgcccagcagtttgttgatctgtttaatgaccggaatgccggcgatgatattaagcgccgctccgataatccggagcagaatctttgcgatgataaacaaaatgacaaacgcgatcgcgttgtaataagccgtctctacgtttcctttaataaaagacagagccgcctgcccgccggaaaaatcaggcgcgggtataaagctcagatgcggggccagatttttgtaaaaaagcgccgcaaacgcaatcgagaggatgaaactcgttaaatatataaattggaggataaatcctctttttaatccaagcaatgtgcccattaagagcaaaactaagatgatgatatctatcatatggtgttcattccttttctttaagctgccgctccagtatttcatatttttcttgcagtttcatataatcatgcacgacattgaccgcagtcaatacagcgagcttatttatatcaagatatggatttttctcgttgatttctctcattttatcatcaaccactccggccacatggcgcatgtgcgctttgctttcttccccgataatggtgaagtgctggccgtaaatgtttactgtcgttttggtttttttgccgtcagacaacgtttctcctccattccgcgagaatcctagttcctatcataccacgattatcgtttgaatggaaagacgagcctcgggctgttatgatacactggtatatacagtgaaagtgccaaaaaaggagattatatcgtgtcccattctgttataaaagtatccgcttccgctatggaacaaatgaaacaatcctatgccggctcccttactcccgccgttccgcagggcgccgtcttccaggccaagcctccgggctgtaccattacagcctaccgctcgggcaaggttctctttcaaggaaaaaacgccggcacagaagcggcccgctggggaactgctgaggcgccgaaagcaaagaaaaccgtcaaaaaagcggccgatccgctctacgctcccccggcgggcattgcctccatgtcagtgatcggctctgatgaagtcggaacaggcgattacttcgggccgataacggttgcctgcgcctacgcagacaaatcaaagctctctttaatgaaagaactcggtgtgaaggattcgaaggatttaaaagatccgcagattattgaaatcgccaaactgttaattaaaaccatcccttacagcctgcttgtgttaaaaaacgaaaaatacaatcagatgcaggaaaaaggcatgagccaaggaaaaatgaaggcgctccttcataatcaggcgatttccaatctgctgaaaaaaatgaacggcgttaaaccggaagcgattctgattgaccaattcgcagagcccggcatttattttaagcatctttccggacgggatatcgtaaaagaaaaaacgtttttcagcacgaaagcggaaagcatacatctttccgtcgccgcagcctctatcattgcgcgatattctttcttaattgaaatggataagctttcccgagaggctgggatgacgattccgaaaggcgcggggccccacgtcgatgaagctgccgccaagctgatcatcaataagggagaaggtgcgctcagaacgttcaccaaacttcattttgccaatacgcaaaaagcgaaacgccttgttgaacggaagcggtcataataaaaaagcttgcagagtgggaactgaccccataatatgagacaaacaaaaaacaccttcaagtttgaaaacggaccgttgttatccgaaataaaacttggaggtgtttttctatggggacaagagtgagttatccggttgaagtcaaacagaaggctgtaggaatgagattggcgggcgtgcctatgaaagagatcatgcaggaattgaatatcaaaaataagactcaggttcagacatgggttagatggcataaggctggggatacccaccgattcgaacagcctgttggaaagcaatatacttatggaaagggtccggagtattcttctgaattagagaaactccaggcagagaatcgttatctgagacaacagaatgaagtgttaaaaaagtacaacgaattggaaaggaagctgatagggaaacgacaatcaaactggtagaagaattgcgcaagacgatgacggtacaggacatctgtgtccatttagatatttcacgcacttcatattatagatggagaaagaatctgactaagagtaatcctaagatgcgactggagaaacaaatcggcacgttgtgccgagaacacaagtatcgatatggatatcgaaaaatcacagccatactaaaaaagagaataagtattaatcataaatctgttcaacgtattatgcagaaaaatcaatggcagtgtcgggttaagatgaaaaagcgtaaaaaaagtgggcagccatattctgtggtcgataatatattggatcggaactttcagtctgatcgccctcttgaaaaactggtaacggacatcacatatttgccttatggacagaaacaattgtacctttccagtatattggatttatacaatggagaagtgattgcttttacgattggagataagcaggacacagactttgtcttagacacacttgatcagctgccaacacttcctgaaaactgcgtgttacatagtgaccaaggttctgtttatacatcttatgagtatcagaaagctgttaaaacaaaaggcattaccatgagcatgtcccgcaaagggacacccgctgataatgcctccatcgaatcgtttcattcctcactaaagtctgaaacgttctatcttaacagcattgatcgaactacgaccgccatcgtagaacgcactgccatagaatacattcattattataacaatattcgtattcaaacgaaactaaacagccaatcgccgatacaatatcggcaattggctgtatgaaggtgttttgatccctgtctcaaaaacgggggtcagtcccagtgatctgcaagctttttctttatcctcttaatacggcctgatacgtttcttccagcgctttcagcacgttttcatgaacttttgtcacttcttcttctgtcaatgtttgttcagggttaacatattggagcgagaaggcgacggattttttgccttcttccatatgctcaccttcgtacacatcaaatacggtgacttctttcagcagcgcgccgccggcttctttgatcacggcttcaagctgtccgcttgtaacggttttatctgccacaagcgcaatgtcgcgcgtgacggacgggtacttcggaatcggcgtatacacgacaggttctgtttcctcggtcagaagcgcgtgcaaatcaagctcgaacacatacgtttctttgatatccagctctttttccattgccggatgcacctggccgataaatccggcaagcgaaccgttcaacagaatgtttgccgtccggccgggatgcatgtttttgcgttctgactggacaaattcaacccggtctgacacattcaattgatgcagcaggccttcaacgattcctttggcgacgaagaaatcaaccggctttttctcaccctgccataaatttttgcgccacaatccggttacagctccggcaacccgttctttttcaaccggttttgtgttttcttctttcgtcagaaatacagaacccgtttcatataaagcaacggaatcagtctgtctggccagattgtatgaaacggcttctagaagattcggcacgaggctgtgtctgagaatgcttctttcttcgctcatcggcagagcaagcatcgtgttgaatgatttttcgatcgcaaaagcggccgcttttttatcattcgttaatgaataagtggtcgcttgtgaaagacccgctccttcaaggaaacgtctcactttccggcgttttgcctgatacggtgtcaagccgcctgtcgtgccggccgtttccggaagcgtggatggaatattgtcatacccgtacaatctcgccgcttcttcaatcaggtcttcttctattctaatatctccgcggcgcgacggcactgttacgacgagaacgtcttcagcttcaccgactgcaaacccgaggcgcttgtaaatgctgatgatttcttctttagcgattgtcatgccgagcacggcgttcactttttcaacagacacgtgaatgttgtttgcttcgattttcagatggttttcttcaaccgtgcctgagagcacttctccgccggcatatgcctgaatgagactgcaggcccgttcagccgccagcaaaacgcgtgccggatcaatgcctttttcatatctggcgctcgcttcgcttctcaatccgaggtctctcgacgctttgcggacggtctgtccgtcgaaataagcggcttccagtaaaatcgcagtggtgtcttcacggacttcagactcagctccgcccatgactcccgcaacggcttgcgctttttttccgtttgtgatgaccaaatggctgcttgacagcttacgctcttgttcatccagcgttacgatggtttcgttttccgccgcttttctgacgacgacctcttttgaaccgaaccggtcgtaatcgaaagcgtgaagcggctgtccgtactcaaggaggacgaagtttgtaatgtccacgacgttattatgcgggcggatgcctgcattcatcagcttcgtctgcatccatagcggtgacgggccgattttgacgtttttaatgatttttgcggcataatgcggattggcctgcgtatcttcaaccttaacggaaacagcatccgccgctttttctgccgctttttcatatgaagcctccggaagctttacctctgcgccgaggatagccgcaacttcataagccacgccaagcatgttcatcgcgtcggcgcggttcggcgttaagcccaattctaaaatcgcatcatcaagctgaagggccgccattgcgtcagctcccgtttcggcatcattcggaaaaacgaaaatgccttccgcatattctttcgccacgagcttgctttcaatgccgagctcctgaagggaacagatcatgccgtgagacgcttcgccgcgcagcttggcttttttaattttgaaattgccgggaagcacggctccgaccgttgcaacggcaaccttctgtcctttatcaacattcggggcgccgcagataatctgcacgggttcctccgcaccgatatcaacaaggcatttgttgagtttgtcggcattcgggtgctgttcgcgctcaagcacgtgtccgatgacaacgccttttacgccctcccctttatactcgataccctcaacttcaataccggctctcgtaattttttctgcaagcacggccgggtcgattccctgcaagtcaacgtaatcttctaaccatttataagaaacaaacatgtgtatcctcctcttacgcctgtttaaactgcgaaatgaatctgacatcattggtatagaaatggcggatatcttcaatgccgtatttcagcatcgcgatacgttcaacacccattccgaaagcaaaaccctggtattcctcaggattgaatccggccatcttcagcacgttcgggtgaaccatgccggcgccgagaatttcgatccagcctgtttttttgcagacggagcagccttgtccgccgcacttaaagcaggtcacatccacctcgacagaaggctctgtgaatgggaaaaagctcggacggagcctgatttcacgatcttggccgaacatttttttggcgaccaattcaagcgtgcctttcaggtcgctcatgctgattttgcggtcgacgacgagaccctcgatctgcatgaattgatgggaatgtgtcgcgtcatcgttgtcgcggcgatacactttaccgggacaaatgattttgacggggccttttcctttatgcttttccatcgtgcgcgtctgcaccggtgacgtctgcgttctcatcagcatttcttctgtaatgtaaaagctgtcctgcatgtcgcgggccggatgttccttcggcaggttcagcgcctcaaagttgtaataatccgtttccacttcagggccttcttcgacggtatatcccatgccgataaataaatcttcaatttcttcaataacgaccgtcagcggatggcgtccgccgatgtttacctgactgcccggcaacgtgacgtcaatcgtctggctgctgagttttttattcatttcttcttgttcaagctgttcatttttcgccgtaatggctgctgcaatgcgctctctcacttcattggcgagcgctcccattttcgggcgctcttcggcggacagtttgcccatgccgcggagaacttctgtaatcggccctttttttccgagatattgcacccgaatgtcgttaacttcttttaatgaacccgccgcttctactttttctgcagcttccagttcgagctgtttaagcttctcttccatcatgcatcctccttttatgtaaaccaaaccgttctatgcctttttcagaaaacaaaaaaacccgccccttgagagaagggacgagttgtggccgcggtaccaccctttttaaggcagacttcatctgccgacagcttcattgacataacggaaacgatcgttccggttcacctttacgcgcgtttggcgcggtcccggtgacaactcgagaggtgaaaatcaatttttgtgctgcgataaaaatgctttcagtcagcggcattttctccctggaaggcagtgtgtgcaaaaattgacgtcctctgtcacggtttttacattattgctatctattatagtgaaatccaaggcttttcgcaacctatcctctgagatgataaacgaggatggcggccgctaccgccacattcagcgattccgcctgtccgtacagcggaacgtacaagttgagatccgttttttgcagaaggccggcgtccactcccgccccctcgttcccgacgattaacgcgaacgattcttcaggcttcacgctttgataagccgcaccgttttcaagcgccgtgccgtagatcgcgacgccttgtgatttcagctcatcggtgaactcatcaagcggacgtttcaaaatgggaatatgaaaatgagatccttgtgctgaacgcagcgtttttccattgtatgggtctgctgttccctcaccaaggacaacggcgtcgatccccgccgcatctgccgttctgatcattgttcctaaattccccgggtcctgcacggcatcaatcagaagcagccgcttcagctgatcaggcctcttatccggcatatggcagaccgcggcgatccgctgcggcgtttctgtttccgtcacggctgaaaacgcgtcttcgctcagcacgtagcacggaatgctcatgtccagatcgggcgggatggcgctctcatcgtttacgagaatttcttttaccgttccctttgatttgagcgcttcttctgccagatgctctccttctatcagaaatgtattcgttttaagtctctctttttttgtgtgaagttttttccagtccttcactttttggttttttgcagagtcgattcgtttcactttatgtctgtgctctccttttttcatgcatgttgttattatatctcaagaacagcacataataaaccgcgtgcgcggtaagaatatgcgtatcacattcaggaaaaaggagcggttgtaatggatcttaatttacgcaacgccgttattgccaatgtaaccggcaataaccaggatcagctggagcatactatcgttgacgccatccaaagcggagaagaaaaaatgcttccgggcctcggcgtcttattcgaagttctttggcagcatgcgtcagactcagaaaaaaatgaaatgctcaaaacacttgaaggcggattaaaacctgcgcaataagcatgaaccgggtgatgagacacccggttttttttgtataataatggcgagggggatcgccatgcagttacagccggaactggcaaagaaattgattgccgaagtcaaacatatgtacagccgcgaagtgattattgccgatacaaaaggcatgattatcgcgggcaccaacgcggcgcgcgccggatggtttcatgaaggcgcactgatctgcgcgcgcgaaaaacggaatgtcatcattacaaaagaagatgaaaaacggctcgagggcgtaaaagcaggactgaacctccctgttttttcaggccatgaagtgatcggagtattcggtctgacaggagaccctgacgatatcctgcctttcggagaattgctcagaaaaatgacggagctgtttattaaagaaacgcgccatatggaagaagcgcagtggcgtgcgagaatgcttgaatcctttatggttgattggctgcagctgaaagaatggtctccgggctttttagaaaaagcaaagctcatcggcgcagacctttacgcataccgccggatcatactcattcaaggccgttatgagcaatataaagcggaggagctcgggcggctctggcagtacgaatgccctgaagatctgtttgtccgctggggaaatgaacgtattctcattaatcatgaagcaaattcggcttccaaaacacagctcattaaaaagatcggcgccgtttttgggcagcctgtcaccgccggcatcggacggatcgttccgggagaacgcctcacggaatcatacgaacaggcagataaagcactttcagccggcataggtgacaagcaggccgtctttgaagaggatttaaaactggatatgtgtcttgccgatatcgcacccggcacgaggtcggaattttcacggcgggttctcgagcatgtactggaccgggaagaacttctggatacgctgcgcgcctttttcgaccggcaattatcgttaaagcgcaccgccgacgacatgcatattcatatcaatacattgcgctaccgtctttccaaactggaatcactgacaaatatgaagcttgaccgccccgaagatataacggctttttatttggcgctgcgctttttagatcaacatacaaaaagaacgtaatcatatcatcatttttcatatgtttctccatagtgtgcggaatcgtttttctttacaattaaatgaaaacgcttttcttatcagggaggttgggagaacatgatttcacgagaggcaaaagaagcgttcatccggacggtcgggaaggagaattatgatgactcggcggcgggccgtcttgtgtattcttatgatgcggctcctcagctgcaagccatgccggatgcggtaatcgccccccgcagcgcggatgacgtgtcccgtatattaacgatttgcagcaggcatgacattccgatcgtgccgaggggttcaggcacaaacttatgcggcggcacatgtccgtctgaaggcgggcttgtgcttttattcaaacatatgaaccgcattcttgaaatcgatgaagaaaatttgacggcaaccgtccagccgggcgtgatcacgcaagatatgatccgtgcggttgaacaaaaaggtttattttatccgcctgatccgagcagcatgaaaatatcaacgatcggcgggaatattaatgaaaattccggcgggctgcgcgggctgaagtacggcgtcacccgggattatatcctaggccttgaagccgtcttggcttcaggcgatatcatccgcacaggaggaaagctgacaaaggatgtcgccggttatgatctgacccggcttttcgtcggatcagaagggacgctcggcgtcgtgacggaagcgaccttaaagctggttccgaagccggaaacgaaaaaaacgttgcttgcactctatgaacatattgaagcggctgcggaatctgtttctgccatcatcgctgaaaaaatcattccggcgacactcgaatttctggatcagccgacactgcaggtcattgaagattacgccaagatcgggcttccgaccgacgcaaaagcggtgctgctgatcgaacaggacggtgacatcgaaacggtcagacgagatatggaaaaaatcgaagccatctgtaaaaacggagcagccgtatccgtccaaacggctgaaaccgaggaagaggcattcgcgcttacagaggccaggcggtccgcattatcagcccttgcccggctgaaaccgacaacgattctggaagatgcgaccgtgccgagatcacaaattgccagcatggtcaaagccattaacgagattgcagaaacatacggcctgtccatctgcacattcggccatgccggagacggcaacctccatccgacgtgcaccaccgatatccgaaatacagaggagatggaacgtgtcgaaaaagcttttgccgccatttttgaaaaagcgattgagctgggcggaacgataacgggtgaacacggggtcggcatcgtaaaagcgccgtatttagaaatgaaactgaaaacagaaggcatcaccgccatgaaagcgatcaaacaagcgcttgatccccaaaatctgctgaatccgggaaaaatattcgccaattcatcaaggaaacgcgtggtggtgatgaaatgacaacggctaaagagcagcaacaaattcaaacagaattcaaaaaccgcatggatgaaggtgaattgctgaactgtatgcgctgcggcttctgccttccttcctgtccgacctatatcgaatcgggatttcaagaatcccattcgccgcgcggccggatcgccttgatgaaagccgtcactgacggactgatcgagccggatgaagatgtcgagcgctcactttcgctgtgtctcggatgccgggcatgcgagcccgtttgtccggcaggggtcaattacggacagctgcttgaagaagcgagggatatcattcatcaaaataaaaaacataagccgggcgtgcgcctcttgcggaaagccgctttcaccgggcttttccctcatcaaaaccgcatgcagacagccgtgaatcttctcggaatataccaaagatcgggactgcagacagccgtcagaaaaaccggtatgctgcgcgttttgcctgaacatctgcgcacaatggaacaagtgctcccgcccgccccgaaacggaaagacatgaaggaaaggccgcgttttcttcctgccgcgggtcccgtccaaaaacgggccgcttttttctcgggctgcttaatggatacgatgtttttagcgacaaatcatgcgacaacggcgcttttacaggcggccgggtgtgaaatcgcggttccggacggccaggcgtgctgcggcgcgcttcacgggcacagcggagaaaaagagatgggaaaagaactggccaagcggaatatcgcggcttttgaagcgcttgacgctgattatatcattacaaacgccggcggatgcggcgcctttcttcaggaatatccccatttactgaaagatgaacctgaatgggcggaacgtgccggacaattcgtccggaagctcaaagacttttcatccgtactggttgatctgaagttccatcaaaaaaacctgcgggcgcagtctcctcatatcgtcacatatcaggactcctgccatcttcgcaatgtgatgcatacgtcagaggaaccgcgcacgcttttgaaaagcattaaaggggctgagtacagagaaatggaaaaggccgacagctgctgcgggtcggcgggaatttataatataacagagtcagagatgtctatgaaaatattagacagcaagatgaaaaccgccggaaaaacggaggcggccgtcatcgtgacagccaatcccggatgccttctgcaaatgcagctcggcattttgcgcgaaggattaacaggccgtgtccgcgcggttcatttggcggattaccttttggaagcggcggatttgtcataaggtgaaagcagagagaccgatcggctctctgctttttttatgatgctgcaatgttcggacggccgcggatttatccgggtattgaagcttccagtctggcacttggatcacgccatacattcgcccattttttcacagccgcaatgataatcacaagcccgagaatgagcatgataatggataaaacgccattcagcacgttgtatcccgccgcttcggggttcaaatacacataccgcaccatccaataacccgcatagttgacggtcacgtacaaataagcgagaggaatcaggcatgtcagcatatagcgccgcttatccgctatttttaatacgacggtcgcaccgataattaagccgacagacgccataagctgattggatacgccgaacagcgcccaaatggagctgatgtcgccggaatacagaagatagccccacagcaggcaggcgagcgcgcttgagaaaatcgagcccggcagccagtctgtttttttcagcggcttatagacctctccgaaaaactcttgaatcaagtatcgggcgacacgggttcccgcatcaatcgccgttaaaataaacaccgcttcaaacataatgacgaattgaaaaaagtatgaagccaaatgactgaaaaacggaatctccgtaaagatatacgtcattccgacggcaagcgtaacagcgccgcccgttcttccttccagactgagcccgatttctttactcaattcaggcagatggacgacattcatcccgagggtgcggaatatttcaggcgtgctgttaatagcaaaatagtcggcgggctcaagagcggcagctgcaatgagcgccataattccgacgagacattccacaagcatcgctccgaaagcaaccggctttatatcactccatttatccagcattttcggcgttgtgccggaaccgacaaatgcatgaaagcccgaaatggcgccgcaggcaatcgttattgaaataaacggccagacaggacccgcgatcaccggccctccgccgtgaataaactccgttacggccgggaatttaatggcgggattgacgaaaaagacgcccgcgatcaaagcggcaaaaaccccgattttcataaaactgcttaaatagtcacgcggagccagcaaaagccaaaccggaagcgccgcggcgaaaaatgcatagacaggaagcgccactgcaagcgttttcgcatccagtgtcagcatgtccccgagagccgttgtctgcagccacggcccgattacaacaccggccattaacaaaagaaacccgacagttgatgcgagtttgagattgcccgtttttttatagtagaggccgacccccatcgcgatcggaatcgtaatccccaccgcaaacgttccccacgggtttttctcaagcgcgtgcagcacaaccatggacagccccgccatcgtgatcgtaatgataaacagcatcgagagtcccgtgcaaaaacccgccaccgggccgagctcttctttggcgacttcagaaagcgttttcccgtttttccgcattgatgcaaacaatacgacaatatcgtgcaccgctcctccgatcaccgccccgattaacagccataaaagccctggcagatagccgaactgagctgccaaaatcggtccgacaagcgggccggcagcggcgattgccgcgaagtggtggccgaatgacacccacttattcgtcggcacataatctttcccatcctcaagcgcatgggccggagtcggtgtctgatcattgatttttaatactttgaccatcataaaggtaccgtaaagccgataggcgatcgccagaatacatatagacgctatgacgattgtaatcgcattcatttaatcccagccccttttctctttttctaaatattatcacaattatcagataacgggagatgatttttgcgtaaaaaaaagccggcgactaagcccggcttttcggaacattatttgcctgataaacggatgacattccaggacagcggagtaaaatgagccgttatcccttgagcatttgccgaagacgttccgtttgagtgaggcgtgacttcatttctgtttttttgattggtcgctttcatatcctgatgctccagcacgatatgctcaatgatacggtaatcttcaaaccctctcagcttgatctccgtttccatcagttccttgcttttgttgacggcaaaaatggtcagggcttcatcctcttcatggtaaacggccgcggcatcaacatacggcacatccgtaaagtccgccgagtcgtatttcggggaggtaatcagcagcttcatcgaagtccctctcccgtagacagaggcgtgcatgtaagggtaaaagatcggctgcctccatgcttctccgcccttttcggtcatgataggcgcaattacgttgacaagctgggcgagacaggcgatctttagtctgtccgcatgctgcagcatggtaatcagcagtgaaccgatcaacagcgcatcttcaaaattgtagatgtcttcaagaatcggccgggccgtaatccatggctccacttttttatccgcttcatttgagtgataccacacattccattcatctaaagaaaggtgaatcgtttttttgctgcgttttttcgctttcatataatcacatacggctgtgacggatttaataaaatggtctaaatccatcgacttcgccaaatagttttcaagatcattttcatggttgccgtaatacgtatgcagtgagatgtaatccacatgctcgtacgtatgctcaagcacctcggcctcccactcgatgaaggacggcatgccgctgtttgagcttccgcaagccaccaattcgatcgtcgggtccgtccatttcatcacctttgccgtttcagcggcgagccgtccgtattcatgcgccgttttatgaccgatctgccaagggccgtccatctcatttcctaagcaccatgttttgatgccgtaaggtttttcatatccgtgcgattttcgtaagtcgctccagtacgacccttcaggatggttgcagtattcgacgaggttccgggcggcatcgatccctctcgtcccgagattgaccgccatattcacttcggcgttcacttttttcgcccacgttaaaaattcattcgtccccacttcgttcgtttctgtcgtctgccatgccaaatcaagcctccgcgggcggtccttcaccggcccgacgccgtcttcccaattgtagcccgagagaaaattccctcccggatagcggatgaacggcacttgcaattccttgattaactcctgcacgtctgttctgaaactgtccttgtcggctttcgggtgtccgggctcataaatgccttcatacaccgcccggcccatatgttctataaatgatccgtacatccgtttgtccacttcaccgatgatatattctttatctgctgtaatccccgcttttttcattatatttcctccctctctctatcccttcactccgcctactgtgagtccggaaatgaagtatttttggaaaaacaagaatatgatgatcaccggcagtatcgcaaaaacggacccggaaatcagcatgtcatagttgttgccgtacggactcagcagccctgaaagtccgattggaagcgtaaacatttctttcgaccgaagcacgatcagcggccataaaaagttattccagctgtttaaagattgaagaatgatcattgccccgaatgccggtttcatgagcggcgccataattctgaaaaaaatgccgaattcggtgcagccgtccattctcgctgaatcaagcagatccttcggaagtccgagcgcatattgccggaaaaagaacacggcgacaggtgacacaataaacggcagaatcactcccgtataagaatcgatcaaatgaagacccaccgtcaatttgaacaacgggagcatcatcacttcaagaggcaccatcataatgatcagcacaagaacgaaaataatatttctgcctttaaattcgtagacaccgagtccgtagccgatcaaagaggaaaaaaacagcgtgagaaccgtggtgagaacgccgagaagcaggctgttaaaaaaccatttgaaataaatgctccccccgttgaacaaataggtgtagttatcaaggctcatcacatccggatcaaggcgcagattcagcccgatgcgcatcagctcagatgatggctttaaagaaccgagcaataggcagatcatcggaaagatatacaacaggctcagcatgataaaaaacaaggtaaacgcgactctgtacacggaaaacatgtgattgttacgcaacgcttatccctcccctttaaacgaaccggacagtttcagtgaaacaagactgactagtaagatgacaagcaaaaggacaattccgattgcggccccgtaccccatttcgttgtatgcaagcccctgctgatataaataaccgacaagcgtgaggccgatattgcccggggaattattctgccaaagcacatagctttcctcaaacattctgaaaccgccgataatactgatcgttaacacataaacggacaccggctttaaaaatggaagggtaatatgccggaactttttccacgtgctcgccccgtcaatttcagccgcttcatacaattctttcggcacgttttgcaatcccgccagaaagtaaagaatgttaatccccatccacctccatgacgcaagcagcaccattaaaaacatgccggtacctttgttgttgagccagttttggggtgatgcgccaagcttcatcatcagctcgtttgcaagcgacgtattcatttctccgaacatcagacggaaaataatccccgctacgatcgtcgatgttaaagccggtacaaacagagccgatttaaacacatttctgaacctgacgagcttcgaattcagaatcaccgccaaaagaagcggcaccggaatcagcacgatcagcgtccagaaggtatattccaatgtgttaaataatgccgtataaaaggttggattaagaagagcggtataattggaaaacccgacaaatgtaatttctcccggcagtatccgttgaaagctcatgataaacacgctgataatcggatacaaaaagaaaacgagaaacgaaatgataaatggcgccgtaaaaagataaggcgccgctttttttgaatacagcacattgcgccggcgcggcttcttccggactgcagaaacggtttgcgctgtctctgtctttacaggtctcataaaagctcccccgctttcactgttaaatagggcggcttctcctatttctctaattgctctgccgcctcgtccaaggcttccttaggtgttttttcctgcgtcttcagcgcatcgaacagcacttgtctgacaacgagatcagccgctttagagaagtcttcatgcagataaatcggattgatctcatcttttatttcaaggagcgaggaaaaaattgacgtaccgttccggaagaaatccgtgtacttgtttttctccttcaattcttttgaatcccacacgtcccagcggagcgggtcaaagccgagcaccgtccaaagctttatattcccttccttcgaacctttcgcaaaaccgagaaattctttcgcgagcttcagatgttcagcctgcttcggcacgacggtggctgttccgcctaaacccgctgatctgtcaccgccttctttccaggccggcatagggtaaatcgccatttttccttttaaatcaggcatataatcgataaaccgtcccatgtaccaaatgggcatcagcactgaggctgccccgccctgattcataaaaccgtagtattcttcgctgtgatggccgccgccgggagccggcagaagggttttatcatttaccatgtcctttacataattcagtgtgtctgtattcgtcttgctgttcagaatcaattttccgtttttgctgtagtagcctgacaattgctgcgaaatcatggatagaaatgtggcggagtcgtttgtttcaaccgttcccatcggtttcccagcggcttcacgcacttttttccctgcccgccggtaatcttcccatgttttaatggaggcgggatcaacgcccgcttttttcatgatatccatgttgtaaaacatgacggtcgtccccacatgtgtatcaaggccgtacaattttccgtttttgctgtataaggccagacgcgcttccacaaacttatcgcggtctttttcaatcagcggcgtcagatcggcaagcgggatatccttccccttcagaaagttcgagaaccggcttaattccacgtcggctatatcgggaagcccctcacccgcgatcagcgaaaccgataaattatcatgcatttgtccataaggataaacaacggtattcagcttgattttgcgatccggatatttctgattccattctttgaccatttcctgataaaactgttcgtgcagaccgttaaacgtccaaaacgtcagctccgtttctcccggccggccggcagtccgtttttgtgaacagccggcggtaaacaagaagagcatcatcagcaccaaacatacagcggtcgtttttttcatgtcattaccccttccactttaggccgtgcggctattgatgcaaatgatgtgcaaagagcgctgcattttcatttatgatggttaaaccggtataacggtctctcagtgtgtgcgcatgcttaagcgcatcgctgacaaggtcctgttttacaccgatctcatcgaaacaggcgggacctcccgcagatgcgagccacccggcaattgtcttgccgtcgggaagcccttcatatgcagattgaatcgcctcgcgaaagtgcggcggcagttccgcaagcttttcgtgacaagccagttctttgtaaatatcactcagcaccgcgcacgcacaaccgaccttcgcaccgtggagaatcggaggctgttttgccttcagcatttccatctcaatccaatgcgagatgtgatgttctcctcctgaggcggggcgggagtggtcaagcgcaagcatgacaagacccgaaacgatcagcgcttccatcagtatctgaatgccggcctccgttcccatggcaatggcagcgcggtgatcaatgcactgccaaagcgcgtctttcacaagcttcgccccggcttctgagtacggctcacccgcaagcctgcgggaaatctcccaatctgccagcgatgttatttttccgagcatgtctccgaagcccgcggctgtcattgaacggggcgcttcttttaatacattcgtatccgcaaataaggcgatcggcgctttcgtttgaatcgtcgttttgattccgtttaatatgagcggcgctcccgccgacgtaaaaccgtcgactgacggagcggtggggaatgagataaacggcaatccgcgctggcaggcggcaaaccgcgtaatgtcgtgaatcgttcctgcaccggccgcaatgatggcatccgtctcttccgcgagattgatcagcgtatagaccagtgtcctctcatcagccgcggcggccccggcttcatgctccggaatgatgacttttgacgctttgatcccgcctgccctcaattcgtccgcaagcagacgccccgccgcctcgtacgtgttccggtcacagacgatgaccggatgattccagcattttttttgcagaaatctgagaagctcttcttttgcattcgcccctatcacgatatcttctatttgaatcggtgagcggctggccccttccttgtcaaactcggattgaatgtcctcaggagaacgtttcatgaaaggattccctccttcgctaattctgtcaggtctttaatagaatcaaggacgatgtcaggttcatatagacggggctccccaagtttggccgaccccgtcagaaccaatacgcttttcatcccgtacaggctgcccattgcgatatctgattcgaggctgtctccgataatggcgcattcctcagggggaagtccgagcgcttcacatgccgcctcagccatcagccaagacggtttgccgatgacaagctccgtttttgctccggcggatgcttcaatggccccgatcattcccgcgacatccatggcatggccgccttcattcggaaaggagcggtcccggttcgtggcgatgatgcgcgcgccggaggaagccgccttaaaagcgagattcagatcctcataggtgacggtttcatgcagggagatgacaagccagtctgccgcctgcgggttttgcgccagggcgacacccgctaaagcgagttcatcagtcagccctttctctcctaacacccacgcctttgacaaaggataatgcttctttaaaaatgatgccgtcacactggaggacagcacgatgctccgttcatccgtgcggataccggcacccagcagtttctttcggcacattgctcttgatagattgccgcggttgcttaaaaagacaacggctttgcccagtgactgaagggtatgaacggcttcttttgcgccgtcaatcagctcccgccccctgaatacggttccgtctaaatcaatcagaaacccggctgcgtcaagtttggccataataagcattcgccccgtgttttctgtaaaaatgcttatcatgcagcactctgtcgatcggactgagctgtttgttcagcataagcgaatggtaggccatttccgctaccgtttcgagcacaacggcgttatgcagggcattcagcgcatccgttccccagcagaacgggccgtggctgtggacgaggacacccggattttgttcatacggttcgttttgaaaggtttcggctatgactttgcctgtatgatattcgtaatctttcacaatttcttcttcatacatttccctcgtgcagggtatagcgctttcaaagtaatccgcgtgagtcgttccgagagcgggtatgtctcttccggactgcgcccagctcgtcgcccagcgggagtgcgtatgaacgattccgccgatagccggaaacgctttatacagataaagatgggtcggcgtgtcagaagacggtttcagcgagccttcgagaatgtctccgtcctcattcaggacgaccagtttgtcagcggtcagctcactgtaatcgacaccgctcggtttaatgacgattctcccgctctctctgtcaatgccgctgacattcccccatgtaaacgtgacaaggttatgttcctcaagcttcagattggcagcgagcacttcttcttttaacgcttcaagcatggcggcttccccctttcgcaaaatcacggtttttaatggctttcaggcgtttcatgacattgttttctttgccgaagtagtgaacgagctctttatattccgcatataagctgtcataaatctcagctctttttcgatccgggacataagagccgtcttttaatttccccatatgcgcacatgcttcagcaatattggagtatcccccgttttcccgtcccgcggcgagcgctccgaaaatcgcggagcccagtgccggcgcctgcggagacccggataattgaatgtccatatttgtgacgtctgcataaatctgcatgacaaacggatttttttcggcgattcctccggctgcgtaaagctcctcgaccggaacgccgttttcccgaaacgtttcgataatcatcctcgttccgaacgccgtcgcttcaatcaatgccctgtagatttcttccggcttcgtgtgcagcgtcatgccgagcatcatgcccgtcaaatcggcgtccaccaaggttgaccggtttccgttccaccagtcaagcgcgagaaggccgctttcccccggaacaagttcagctgcttttttgctgagcagctcgtgaatgtctatgtgtttatcctcagcttccttctcatagtctctcggaacgcacgttttgacgaaccattcaaagtggtcgccgacacaggactgtcccgcttcatatcccgcatatccgggcaagatgccgttattgacgaccccgcacataccggggacgagatgttcttcctcgccgagcagcacatggcaggtagacgttcccataatcatcagcattttccccggctctgtaataccgaccgcgggcactgacacgtgggcgtcgacattggcgacggcaacggccgtccccggcagaagcccggtcagctccgccattttttcggtcaaacctcctgccttttccccgactgaataaatggtgccgcttaatttatcttttgtaatcgttttcattaacgggttgagcttttcaaaaaaatgatccggcggataccccgtctcctcattccagattgctttgtagccggccgtgcagttgcttcgcttcaatgaaccgcacaattgatagacgatccagtctgccgcttccacaatccgatctgccgccttgtatatatgcggcgcttcttccgcgatttgcatgattttcgggatcatccattcagaagaaattttaccgccgtatcttttaaggaatgtttcttttgtgtcttcggcaatcgtgttcaaacggtctgcatgtttttgagccgcatgatgcttccacagcttcacataactgtggggctcccgttcaaattccggcagcatacaaagcggctgccccgcaccgtctatcggcaaaatcgtgcaggcggtaaaatcaattcctatgccgatcacatcttttggatcagcgcccgcctgctcaagcaggttcggaatcgccgtttccagaacttcgatataatcggcaggatgctgaagcgcccagtcccgagggagtttttcacccgtcttcggcagcgtgcggtcaatgacagcatgagtatattcttttaccgcagacgcgatttcttcgcccgtgcggacattgacaagcaccgcccggccggacaatgtgccgaaatcaacaccaatcgtatacgccatatcaattccctcccagccggtataatacgtcattccatttcagctcttttttcagctcatgtatttcggtattgcgggaaataaagatgctttcaatgcctgccatctcagcccagtcaagcatctgttcagccgtaagccggaaggacatacaagtatgatgggcgcctcccgccaaaatccatgcttccgcagctgttttcagcgatggctccggcttccatagcacccgcgccacagggagattcggcatatcatgatcaatttccctgccttccgcttcattcagaatgagacggaatcgcccgccgatatcaatgatgctggcgatgatggctgaaccgccgattccgttaaagaccaaccgggccggatcttccttccctccgattgagagaggatggacttcgattttcggctgatcaagggcgatcgtcggacatacttcaagcatatgtgatccgagaatcatcgcacgccccggttcaaaatggtacgtataatcttccatgaaggaggtttgttctccgtccgccattattttcatcattcgcacaagggcagccgttttccaatcgccttcgccggcaaatccgtaccctttttccatgagacgctgaacggcaagacccggaagctgcttcattccgtgcaaaacttcaaaggaggtcgaaaacgctgtatatccgccccgttcgagaaaggccgttaatccgagttcaattttcgcctgttctttaatggaagcaacttttgcttcatcccgttttgtttcgccgctgatgacatacaatttgtcgtattcctcataaagcgcctcaatttctccgtcggtgacgttgttcatcacctcggtaagatcgccgattccgtacccgtcaacctgccagccgaattggatgtgggcgccgactttgtctccgtcagtaaccgccacattccgcatattgtcgccgaaccgggctactttaatattcctgctttcattccaggcggcagcagtgttcatccattgcgaaatgtcatgtttgacttcctcatcatcccaatagcctgcgatgacttttctcgtctgccccattcttgactggatatacccgtattcccggtctccgtgagcggattggttgctgttcataaagtccatatcaatcgtttcccacgggatgtcgcggtgatattgggtatgcagatgaagcatcggcttttgaaaagcggaaagaccttcaatccacattttcgcaggggaaaatgtatgcatccatgtcacgaccccggcacagttttcttgatactgcgcttcccgcaaaacctctctgatcgtttcagatgacgtgacaaccggtttatgcctgatcttgtatcttgatgacaccccgctgaggccgtcacatattccctttgcgtgtttatcgacaagctgcagcgtttcctctccgtataagtgctggcttcccgttacaaaccaaaattcatattctttgttctgaagcacattcatttccccttcccatcaaaataaagcgcttgcatttttaaaaacatacgtacgaatataaactataaaactttcatccttttatttgtacgaacaattttattatagttaaggaggaatcaaactgtcaatcttttattgcaagtaaaaaagccggacacacatgcccggctgatcaattaataggaaggccagcctgaactccaattgatatcattgatgagcatcttcggaattccgctgttttcggcatcatacgcatgacgcactaaaatatttccgttcacaatgtcttgaccgcccgggcctttccagcggtcattgccggagtcaagaatcgtccctccgccttctgacatgcttttcccgcttttatcgagatatggtccggtgatgcttttggatcttccataagcgattttgtacgtactattcacgcctgaacagcatttatcaaacgacaccattaagtaatagtagccgttctggtaggtgatggccggcgcttccaaagctccgccgttattcggtctggcagcgatggaataaagtgatcccgtcggtttcattgtatttttatcaagctttgtcagcttaatgccgctccaaaaagaaccgaaggcaagccaagggtttccgtctttatcaattgtcagctccggatcaattgcattgtagttatcggcgcttgttgaacggatgacgagcccttcgtccttccagtttcccgaactgaggcttgtagatgatgcaagaccgatcgcggaggtatttttgccgaatgaagaaacggcataatacagccaatactttccgttaaaatattgaacatcgggggcccattgattcagcccgtaattcggcacataattgccccaccatgacagcggggaagtaaagattgatttctgaacggtccatacgccgccgctgcccgcctttaagacgcgaagccccctctccccttccaaaccggttccgaaagcgtaccacgtgtttccttccttcgccattgtcggatcgtgaagcaattcatttgatgccccccaaaacgcggcagatgccggagatgaagacatcagcagcagaccggctgtaacggctgcgcatgaaaagcggatcatgcgtctgaatctgtttttcatttgtaaaccctccccttttttaaagcgctttcaaaaacgtgttgtcagatttttctatgtcttctcttattgtagacgcagggctcatatttgtacagacaaaaaaaagaatctgcttaaaaaagcagattcttccgtatctttattgataagtaatacggtcaaccgtttcccggtctaattttttaatcacttctgtgatcaattttaccgtattctcataatcatcccgatgcaaaatagcggcatgagtgtgaatgtagcgcgtcgcgatcgtaatggacagcgccggcactccgtttgcggttaaatgaatggaacctgaatccgtgccccctccggcaatggaatcgaattgatacggaattcccgcttcttccgccgtgttcacgacaaggtcgcgcagccctttgtgagataccattgacgcgtcatacagaataatttgcggcccttcgccgattttgctttgtgcctctttttcagaaattcccggtgtatctccggcaattccgacatccacaccgaacgcgatatcaggctgaatcgtatgtgccgctgttttcgccccgcgaagcccgacttcttcctgaaccgttccgaccccgtatacttcattcggatgatcgctgtttttcagattttttaatacatcgatggcaatcgcgcagccgatacggttgtcccatgccttcgccaataaatgtttttcattgttcatcactgtaaattcaaaatacggcacaatctggtcacccggaagaacgccccattccattgcttcttcacggctggacgccccgatatcgatgaacatctctttaatatcggcggctttttttctggcgtcaggaggcagaatgtgaggcggtttcgaaccgatgatccccgtgatgtcccctttttttgtcacgacggtgacgcgctgggccagcatgacctgagaccaccagccgccgacggtttgaaagcggagaaagcctttatcagtgatttgcgtcaccataaaaccgacttcgtctaaatgccctgagatcatgattttcggaccgttttctttgccggtttttttggcgattaagcttcccagccggtctgttgtgacatcatcagcaaatggttctatgtatgatttcatcacttgtcttacttctctctcatttcccggtatcccttttgcatccgttaacgctttcagcatggtgagcgtttcatctaattttgtcatcaatagacctcctttttttcactacccttcttattatacaaaaccaatgctgaagcatacgattaattcgcctgaaaaacgggtaaatgtttttatctatttcttttaaaaaaatgaaaccttttgttttgtttttcgtattacatcagatcatgacaaaggtgaggaggtgccttcacacatatggccattacagtattgaggattgtcttgcttgcacttcttatttattttatttacatgggcgtcaaattttacgcaaacccgaaaagaaggctcagactggcgcaatcaaaagagaatttttattttattgacgaacagaaaaacacgcgaaaaaatctccagcttacttataaaggagtgctctttgaaggagaaaagcatatcccttccaaagatcatccgctgtttattcatacgatatttgtatggaccgaaaatccggaaaagctgaactgcttttctgcaggtgattttgaagaagtcgaaaaaaaggtattggagcggtatccgaattgcaagattgattgggaccagcccatcaaaaaagcgaaaaaagcaggcgagcgataagctctcctgctttttatgttttatacaccaaatacatcagcacaagggcggcttcagtgagaaaaagcagcggcaccccgtataaaaaggatttgtgtttcgtcttatgcctgaaggtgcgcatgccgatccatacgccgagtgagccgaacatggcggctgtgagccatattcgtttctctgatattctccaccggtgcgcctttgctcttcttttatcagcgcccatgatccaaaagccgtatccgtttatcaatacggcgtaaatgaagagagccattgattgtcaccctttacgtaaaaaaaccgctcccggaaagagagcggctttttcaacttacttgtctaactgagctttagcagcatcagcaagctgattgaaagcagtaagatcgtttacagcaagatcagcaagcattttgcggtttacttcgatgcctgaaagcttaagaccgtgcattaaacggctgtaagaaagaccgttcatacgtgcagcagcgttgatacgagtgatccaaagcttacggaaatcacgttttttctgacggcggtcacggaatgcatagtttcctgatttcatgacctgctggtttgctactttgtataatgtatgttttgaaccgaaataaccttttgctaatttaagaacctttttacgacgcttacgtgtaacagttccgccttttactcttggcattagatttccctcctaattgttccttgtccgattacttgatgttggcaagctgttgtttaatgcgtttgaagtctcctgcgctcacaatagcacccttgcgaagcttacgcttttgcttttgggatttgttggcgaataagtgacttgtgtatgcatgagaacgttttaacttcccagaacctgtctttttaaaacgtttagcagatccgcggtgagttttcatttttggcatgggatttcctccttattgcttttcgtttttcggcgcgagcattaagaacatgctgcggccgtccatttttggttttgtttcgactgtcgcaacttccgcacatgcttcagagaaacggtccaatacacgctggccgatttctttatgagtgattgcgcgccctttaaagcggatagaagctttcactttatcgcctttttcaaggaatttaatcgcattgcgcaatttcgtgttaaagtcatgctcatcgatcgtcggacttaatctaacttcttttaagttaatgattttttgatttttgcgtgcttctttgtcctttttctgctgctcgaatctgaacttaccgtagtccatgatgcggcagacaggcggttttgcatttgctgcaactaacacaaggtcaagatttgcgcggccggcgatttcaagtgcttcctgacgggacttgatgccgagctgatcgccattttgtccgatcagacgaacttcacgtgcacggataccctcattaaccaattgatctttgctaataatgagccacctccatagtttcttcgaattgattcacaacgcttgttgactgcattctgcaggcaaacaaaaagtgcgggcatgacaacacacccacactacgaacatctgcataaataaaaatgtacggtcaacctgccaactacatgaatgtgtcaatcaggtgagaagcgggtgcctctgcttgtgatttatattcaattcaataactattctacacaataccggatcattagtcaagaatgacttctccggatcaactttttcattttaacacgatgccggggcgagcgcaaggaaaaatgtgaaatttcgttctttgccgcccgcggacgtgccaacacaataaaaaaacccgggtctatgacccgggtttatcctccgatgagctgaacgaataccggaatgaccagcaccgtcaccactcctacgacgacaaccgcgatacttgccattgccgcttctacttcccccatctcaataccgaccgcaacaccgagtgcgtgtccggatgtgccgagagccagtcccttagagattgggtgtttcactttaaacaattttaagaatagagcgcccagagcatagacgataacggcgttgaaaataacggcgaaagcggtgatgtcggtgatgccgccgattccttttgacagcggaagggcaattgccgttgtcgccgcctgcggaagcatgcttttcataacggccgcgtcaagatgaatgccttttgcgatcaaatagacaatcgtgactgagcagatagagccgacaatgatagaagacatgatctgccaccagtattttttcagtttgtcacgctgtttgtataaagggatcgcaaaagcgatcgtcgcgggctccaggaagaatttaataatgtctcccccgcttttataatcttcatatgaaaaaccgccgagcttcagaaaaaggattccaagcaccatcgcgacaaacagcggggtgaagaggaaaaagcctctcgtttttttaaataaatacgtgccgatgccaaaggccgcaagtgaaacgacaataccgaaatatggactcatccgatttccctcctaatgctgcacaagttctttttcctgattggaacggcgcaccgtttgtttttcaggagctgccttctgacgtttttggctgacagacaagatcagctgagaaaaaaggcccgtcgcccctaacagaatgatggtagcgagtaagatgacgagtgcgatctgcacgccgtactgctgcatgacgccaagtgaattcatcacggagatgcccgacgggacaaataaaaatccgatcagtgacgttaatgatgttcccagcgtttctacttgttcaagcttaatcactttcaggcataagaggacaaataataacaccaaacctactacggaagcgggtataggaatggggacaatcgctgcaatcccattagatatgagcataattacggcaaaaataaatgcttgtgtcagaaatccgtacacttttttcgcactcattttcttcacctctttctctttgttaggttcattataaaagagaaatcgccttttaaagcgctttcataacaaacggctgaatattcattctgaaatgcaaaaaacggctgttgaaatgcaaaagccgcctcatataatatgaagcagcttttttaagtccttggcgtatgtacggctgacgggaattttagagccgtcttttaagataagattgtacgtcgaattaaaccacggatgaatttccgtaatatgctccgtattcacgatgaacgcgcggtgcactctcaagaaacccgtatcaggcagttttttctcaatgaccgccaaagtttcatgaacggaataagacgcggcaaacgttttaacggaaacgtgtccgtcctccatgccggcgaaaataatgtccttcgtatctaaaatgacaatagattcaccggctgatacagccagtttatgcgctccggctgcggacggctgctctgagacggctcctgccctgtcccgcttcactcttttaaactttctgatcgtctggcgcactctttcttcatcaaaaggcttcgttaaataatcgagcgcgtcgacttcaaaggcttttaaagcaaattggtcatacgccgtcgcaaaaacgacggccggcggatttttcatgtttttcagccgtttggcaatgtcaaatccgttttctcctgacaaatcaacgtccaaaaacagcagatccggtttttgatccatcatactgtcaaaagcggattcaatattttcagcttcgtttatgtcacttacttcattcgtccgtttcagcaaataagctaattcatctcttgccagcatttcatcatcaacgattaacaccttcagcatgttcttctcctttagtcatcagtttcaaaggcagctcaaatgatacgtccgtacctttgccggcctcactttccaatcgcagggctgctttggggccgaacagcccgatcagccgttgatttaaattgtaaagcgcggttcccgtcccttctttagacggcagcggacggtttccgagcacggacagcaattccggatcaattccccgcccgttatctccaacccgcattaaaaccgactgaccggcggataccacgctgacattgacggcacagctgtcctgctttcttgaaaatgcatggcggagcgcattttcgacgagaatctgcagcacaaaaggaggaatttcgatgtcctccaaaccgcgttcgatttcaagactgattttatatttcccgggaaaacgggcctgctccaatgataaatacgcctgcagatggttcagttctttagaaagcgggatgagcagctgccttgccccctgcagattggaacggaaatagacgctcagctgcagcagaagctttcgggttttttccacatccgtacggcaaagagcagaaatcgtattgatcgcattaaacagaaaatgcggattgacctgtgcctgaagcgcctttatttctgcgtctttcagcaatttgctctgcagttccgcctcgccgagttcaagctgggtggaaaacagcatggcgagtccttctgcaagctcttcttcaacccggcttaaacctgacgggcttttaaagtacattttcaacgtcccgatcgttttgccgtttgacgtcagcggcaatacgatcgccgcatgcagcggacagggatcgtgcgtgcattcaatttcttccttcgatgtcgctttcataatatgacccgttttaatgacacgttttgacaatccggtgatcaggctttcagacggaatatgatggtcggcacccgcgccgacgtgcgccaaaatcttttcgttatccgtaagcgataccgcgtccgttcctgtttgcctgtgaatgatggcggcgacgcttttgcatgagctttcattcagcccctggcggaaaaacggaagcgtctggtctgcaatcatcagcaccctgtgggtttcaagggctctcgcccgttcttccttccggataatcgactgaatgatcgaaagaaaaataaaagtccctgacccgtttaccaatatcatcgggatgccgatgatgctcacaagcgtccaagcatcagaaaacggcttggccatcaagaggatgagcagcatttgcagcgattccatcccgagtccgacaagcgcggccacccgcggtgtcggcatcgcatagcgttttctgaaataccgtccgatccagccggacaaaatgcccgctaaaacggatgagacggcacagctgactgcggtcgcgccgccgagtgataaacgatgcaggccggccagtatgccgacgccgatccccacatacgggccgcctaagagtccgccgatttcaacgcccataattcttgtattggcaattgaaccggacggattaatttgaaacacccagtcattattcatgattgtattccgctgaatttctattcccgtatagttgctgatgatactgaacagcgagaaaattgaaatcagcaccgctttgcctttatagctctcaggctgctggagcgcctgtctgaacaatctagtatgagccagaacaaatcccaatatgacgataattccgactctttccagcatcatgatgatcaaatgcagcatacttttcacctgttctttcaaattttattttatcacgttttagagcctgagacagaatctgacacaaacctgcctgtttttttcaaatcatctgaaaacaaatctttcacagtctatatatctattgtagaataaacgggagccttgcggcagagagtttcagaatataacaaagaggagaagatcatgaaagccgtattttttgatttggacgatacactgttatgggatgaaaaaagcgtcagaacaacattcagggaaacatgtttacaagcggaaaaaaaatatggccttgacccgcatacatttgaagatgcggttcggaaagcggcacgggaattgtatatgtcatacgaaacctatccttatacggtcatgatcggcattaatccgtttgaaggattgtgggcgaatttttccgagccggtcagcgaaggatttaaacagctgaatcggattgccccggaatacagacgaaacgcctggacgaacggcttaaaaagcgtcggtatagacgatgcggcttacggcgaatatttggcggagtttttcgcggcggaacgcagacagcgtccgtacgtgtatgatgaaacgtttgcggtgcttgataagctgaaaggtgtttatgaattgcttctgctgacaaacggcgatcccagcctgcagaaagaaaaactcgccggcgttcctgagctcgcgccttattttaatgaaatcgtcatctcaggcgctttcggaaaagggaaacccgacgcctccatattcgaacattgcctcggcctcctgaacctgaaaaaagaagacgccattatggtcggagataacctcaatactgatatattgggagcgaaacgggcaggcattacgacagtctgggtaaaccggacgcaaaagaaaaatgatacggacattgcgcctgattacgtgattagcgatcttcacgagctgtttgcgattatagagaaacaaaaagaaagataatgttatacgcaaaaaaaccccattctgaatgaacggggtttttgtatttccggttattttttcgcttcggctacagcctttttcacaaaatcgtccaatgagacggtttctgatttctgctcgccgtatttccggacgtttaccgcgccgttttccgcttcttggtcaccgaccacaagcatgtacgggattttttgcatttgcgcttcacggattttatagccgattttttcgtcccggctgtcaagctcgacacgcaggccttcgcgctgcaggcgctcctgcacttttttcgcatagtcaagatgcacggacggtgatacaggaatgacttggaattgcaccggcgcaagccatgtcggaagggcgcctttgtgctcttcgattaagaaagcaacgaaacgctccatcgttgacacgacgccgcggtgaataacgacagggcggtgctgtttgccgtcttctccgacgtaagtgagatcaaagcgttccggaagaaggaagtcaagctgtacagttgacaatgtctcttctttgccgatcgccgttttcacctgcacgtcaagtttagggccgtaaaacgccgcttcgccttccgcttcataatagtcgtgccccatctcatccattgccgccttcagcatggattgcgctttgttccacatctcatcatcatcaaaatatttttccgtgtcttcaggatcgcggtaagacaggcggaatgtgtaatcattcaggccgaagtcttcatatacgtcttgaatcaaacggaccgtgcggatgaattcttctttaatctgatcagggcggacgaaaatgtgcgcgtcatttaacgtcatgccgcgtacgcgctgaagacctgaaagcgccccggacatttcgtatcggtgcatcgttcccagctctgcaatccggatcggaagctcgcggtagctgtgaatgtcctgcttgtaaatcatcatatggtgaggacagttcatcggacggagcacgagtgtttcattgtccatttccatcggcgggaacatcgtatcctgataatgatcccaatggcccgatgtttcgtacaggtctttgcttccgagaacaggcgtatagacgtgctcataaccgaggctcagctctttatccacaatgtagcgctcgatcacgcggcggatggtcgcgcctttcggcagccagagcggcagaccttgtccgactttttgagagttggcaaacaattttaattctttgcccagttttcggtggtcgcgctctttcgcttcttcaagcatgcgcaaatgctctttcaagtcatcctttttaaagaaggccgtgccgtaaatgcgctgaagcatttggtttttgctgtcgccgcgccagtatgcgcccgcaaggctcagcagcttaaattctttaattttgcctgtagacggcacgtgcacgccgcggcacaggtcaaaaaattcgccctgctcataaatggagaccgtttcgtcttctggaatcgcatccagcagttcaagcttcagattatcgccgatttccgcaaacatggcttttgcttcatcacggctcacttcttttcggatgatcggcagattttcaccgatgatccgtttcatttctttttcaatcttcggaaggtcatccggcgtcagcgcctgttccatttcaacgtcataatagaacccgttttcaatgacggggccgactccgaatttcacatctttataaatgcgtttaatcgcctgggccaataaatgcgccgtgctgtgccgcatgatgttcaaaccttcttctgtgccttctgttatgatttctacggcaccgtcctcttgaatcggcgttcttaaatcaatttcctgtccgttcagttttccggctaaagactttttctttaatcccggactgatggatgccgcgatatcttctgttgttgttcctttcggaaattcctttaccgctccgtccggaaatgtgatgttgatcatatctgacatcttcgtcactcctttttttatgcaaatcaaaaaccccgccccctatgaaagggacgaggttaaataaacggaatcgtggttccacccttttttccgcgcggccgattgcttcggcacctgcggctctaaactctgtaacgggagttcccgtcagctattactggcgcttattccggcgttcacagctgaagttcaaaggcggtaaagacaatgatccatagctggaaagctttcagcctgggctctcctctcttataaagccggtatcaatgcttcatgtccttatcaatacgtgtagcaatcattaatcttttatgtattataaaatgtctgtgagaaaaatgcaactcggttttccgtctgatttcgcaaagacagccctgccgcttacacaaggccgtccgtgcggctatccttccgtcttctcggctgcaaacgcgcccagcggaaaaaggcgcaccctctcctgaaacacgttttgaatcgttctggacatcatatgctccggtctgtccgtatacagttcaaccgtctcaggcgcaatggagatcagcggcgcaaggagatgggaatctatatacatcgggtgctcccgcacaaaccgtctgtctatgtattttttctgttcccgttctgacaaatagcgcagctcccacagcgtaaaagcccggtcatgtacgatgcggactttcttcatccgcggcggattggatgtcacataatctctcagagactggataaagttttgatattcctgttccatccggtattcatctatcgcagcctccgcgtattctctgagccgctcataatacctgccgagccggaacgtctgaaacgaacgcacggaaaaaacacccgcatcaagtgaaatcgtccggagcgcatctgaaataaactgtgtgcgcggctctttcttcggctcgaacggatgatcatcaagctctccttccataatgctgtgtgcaagctgaaggatttgctgctgttcatcctgatcggtgaagcagtatgcatcctcaataagcgaaagcatatgctcgtcttctttgcattccaaaaaaaacctgacaagtatcggctcaataaagcgctgaacgcaaaaagccgtttcagaccttgcgattccgactttttttatgccttcacggacaataaaatgtctccggtcgtccgattgctgaatgagatgtaaaaaagcggcggtatcgtggtcatcttcaaagatcacttcaagcatatttgtccccccttacggcatttgttacaagtatatgggggatgtttttaaaatagacgtaaaggttagctttcaccgccgaacaaatgacgcaccttctttttaaatataacgggaagcgataaaaatacgatgtaaagacagatcacgccgagtacggtcagcacattgccggacataaagctcgcgccgagcacattcaggacgatcgtccccggaatgatgcccgctgcggtcgccaaaaaatacgttaccggcctgactttcgataggcccgcggcatagctgatcacatcaaagttaacaggcagaatacgcaggataaaaatataaaagaagccattggttttcatctgcttttgaatggcttccatttttccatgacggcttttctcattaaaggcaaacagccccgccgcaaaaaaagacgcggcggcagcgcccattgagcccgccagcgtatacacggtgccgaaaaacgggccgaacgccaatcctccggcgacggaaacgattgatacgggaaacagcacaaaaggcctgacgatggaaattccgataaacacaagcggcgcaaaaacaccgaacgataacacccacagccgtatctccttaggcgacagattcagatatttgcggtttgcccacagcaaaaggcccgctcccgccgcagccgcagcccaagtgacagccttcttattcctcattccctcaaatccttcccattggacgccggcatcatgaacggcggcggttttccccgtcaagacggacgggcgaagccaaatataaaatccgctccatcagtcttgccgcttttacttcttccttttctccccgctgtgaatacgtaaaatgatgcttcagctcgtcaggtgagaaattagacgagaagaaagtgggaagctgctggctcattctgtgctgaagcacggtgccgatgacctcatctctgacccagcttgtcattgactccgctccgatgtcatcaagcatcagtacgggcgtcgttttcaccatattcagtttcgcctccaacgactgatcctggagcgagtttttcagctctctgacaaattcgggaacatatacgatcattgatgaatactctttttccgccagctcattggcaatggcggctaaaataaatgtcttcccgattccgaattttccgtacagatacagccctttgcctttccccgtttcattatagctcttcagaaaatccgtcacatgctggaaaatgccgactctgctcggatcggtaatgtcgatctgctgaaacgtcgcgccgagaagatcctgctggatatacatgctcttcatcagggacttttgccttttctggcggtcgagctttctcttttccggacattcgtaatattcaatatcgatggaacgcccgttgatcacaagcttcggatgatagccttcaagcaggctgttcgtccggctgtctttcgaacagaaggcgcactgtttgctttgctgaacgaattcgtacagtttatttaaccctctgtcaatcatgctttgattgattacatctttctgttccttcaaaaaagcctggacgtcttcgtcggccatgacttgctgctgcattcgttccaggcgtttttgaaagtcaggtcttttcgtcacgccttctaaggatcggctgatcggttccattcaatatcaccccgcttctctgtctcaataggcagagtattttttcagttttttcatttcttccatcatttttttcttctgttcttcaagatcctgcgcggaaagagccggctgttcttgtttcttcccggtttcttctttcatccaatcagggcgcttttcttcccggacggtttttttgccgcgcgccgcgccgtttgttttgccgtccgcccaatcaagatattgcctgtgctcttctattgcgagcttcattgcttcccgtaccgttttgactttctttctggcccagtgggcggcgattttttggatatagtttttggacagcttcatatccgttttcagcatgacataataaatcagcacattggtgacgccgggctcaagcttttgttcgaacataatatcggcaataatctgcaagtcggcttttgacggctcggtcccgtccgcaatgtcctgaagaagctttctcggtgatatggtctcaagctgtgcgatgagttcgccgttcaatgaatcgtccttttccgtccggttttctctcaaggtgacaggctgtgttttatcaatcagttccggaagcttaccgcttctttcaatttggtaccagtcgctggccgctttcctcagcgcttcggccgttatcgtatcctgttcattaattgcggtcatgacgacgtgctgcatggagataggatctattccgtataaatatgaaagctttttaatgctctcccgcacgtcctgcgtgattgatttacgcggtatcatcgtttctgacagtcccgccatgaaaagctcaaaatcaaatacttcctccgtcaccgtataggaaggcgcttgtccgacagacgccgtctcatagtcctcggggagcttcatcgcctcttccatatcaggcgtcattttccattcgctcggctgaaaagaggcaaaagcgtgattaaacggacgggtaatttcccttgcgcccgcgccgacggaagggtgcgtgtaaaattgtctcagctgctggtatttcgttttaccgactctgttataaagaaagacattcagcatgccgtcttcaaagaaatcattcggtctgagcgggggcagcagctcataaataaacatccgctctttttgctcggactcccggatatacactttcagcagcccgattccttcaagctttccctgttcatgatgaatcttttttaaatttgactgcatcatgcccatcagctgcctgtgcgtggattccgctccccacaagcggttctgctcaagctctccccataaggtcatataaagggagaatgcaaaagaaccgatcagcggctggtacagatgtgtcaaaacctgtctgtcgacatcctgaagaagcgaacggcttttgaccgtataaggatctacaggcaatacgtcattccaatagtcagccatgattctcaaaccttccgatatgtttctactctcattttacaccgtttctgcgatctatcaaatgccaattttgctcatgagaaaagagccagacacaatctcttagctctctcagcgttctttctttattaaatctttcaattcatcgataaacacgtttatatccttaaactgccggtagacggaggcaaagcggacataagacacctcatcgattttcgccagacggtccattaccatttctccgacaagttcgcttttgacttcagatacaccttggtttctcagctctttttcaatgtcaaagcacatgtcttccaatgtttttaaaggaacgggccttttttcacaagctttaattaacccgcgcagcattttttcacggctgaattcttcccggacgccttcttttttcacgacgatcagaggcatctcttcaaacttctcaaatgtagtgaagcggtaatggcaggcttcgcattcccgccttctgcggattgatttcccttcgtccgcaggccgtgaatcaagtacgcgggaaccgttgtgctggcatgaaggacatttcaaattggatcagctcccatctgtttcgttgctgtaatgcggttcgcaagcttccggtaaatgcccgccaacgtttctaggatgagcctatttgttgggagagccgatagaccggccttatcttttctattttacaaaaaaaatgcttaaagaaaaagcaatgctgtttttttacattagaaaaggagcatcagcttcaaagcgcgtaatggctttttcagcttagctcccttgtgtttgcgttttgaaaattacagtactttcgcttgtgcctgtttaatctgtacaggccccattcctctcggtatttcaatgttttctcttgtatctgcatgtaatgcgtccgcaatgtaatccgcagccacattaggatccaggtctccacaagtataaacatcaatgcttgcatatccgtgttcaggaaaactgtgaatcgttaaatgtgactcagagataataacgactccgcttacgccttgcggtgcaaatttgtgaaatgcgacctcgcgcacttcagctcctgatttcaaagcagcatttacaaacgttttttcaataaaatccatgtcattgagcttatcaaaatcgcatccccacagctcggagatgacgtgacgccccattgtttccataatcatggaccccccttaacaagaattaaaaaagtgaatttccgagaactgacccggccatttaccacgggggaaagttagtccggagaggtcctaaccctttaagtaattccgaagcagtcacgagcaagaagttcacgaaagatagtatactgtgtttaagtttattttgcaaggtgtgttttttgcgaatatgccgttaagggtttacaaatgtccatgatctttagtctacacagctgacgggtgtttcattcgcgcggcgacgtgacggataagatcaacgacccggcaggaatatccccattcattgtcataccaggcgagcacctttacttttcggtcttccatcaccatcgttgtcagaccgtcgatgatcgcagagtgtgaattcgtattataatccgaagaaacgagcggctcatccgaataatcaagaatgccgtacatcgacgtttttgcggctctttggaaagcggcgttcacttgctcggccgacacatctgttttcagatcgcagacaaggtccactaatgacacattcggaacgggaacacgcaaagcgagaccgtgaagttttcctttcaaatgaggcagcacgagcgacagcgctttggcggcgcctgtagaagtcggaatgatggattctccgcacgctctcgccctccgcagatctttatgcggattgtcgatatttttttgatcattcgtgtaagcgtgaacagtcgtcatcaggccgctttcaatcccgaattcctgatcaagcactttgacgaccggcgcaagacagtttgtcgtgcaggatgcatttgaaataatgacatgttcatcgggattgaactgctcttcatttactcccatgacaatggtaacgtcttcatttttgcccggagccgttaaaatgacttttttcgcccctgcttcaatatggctcattgctttttcttttgaattaaattttcccgttgcctctacgacgatgtctattccgcattctttccacggaagctctctcgggtcccggcgattgaacagcataatatgttttccgttgacgatcaggctgtcgtcggaggtctcaacttcttgatcgtatttgccgtgaattgtgtcatactttatcaaatgagcaagcgtttccgggggatagcttgcattaatggctgttatttgaatttgatcatcttccattgcttttctgaacaccattcttccgattcttccaaacccgttgattgctacttttaccttcatgctcaggtcacccctttttaatatgccactctaatttacctttatttatatatagtataacacattaaaagaaatccgccagtacaacttgataaaaatccacccttataccgatcaatatgttgttcaatcggtttttttgcatataaaatgatttttcttccataaaaaaagcaggatcagcgtctcaggctgcctgcttttttcttatatttgtcccggttctttaaatttgtcatttaaaatgctgtcctctaaaacggaagacacctcgccgtaccgtttagcaatatgcatcgcgccccagtcgcacagcgcgtttaaaattctttccagactgtgcccgtattcactcagctcgtattccactttcggcggcacctgattgtatacgatccggttgatgacgccgtcagcttccagctcccgcaattgctgtgtcagcatcttctgggtgatgtccggcataagccgcttcaattcgcttgtccgttttttcccgcgcatgaggtggcagaggatcacacacttccattttccgccgatcacttcaagcgccgcctctacggatatattgtattttttcttcagcaacggtaattcctcctcatctataggaactaaaaagtgcctatggcacttaaaagtacgttcttttcaatgacacttctatcgatcataatgacatttgccggctgaaaaggaatgtactcttatacttatatcgtttacccggcatcatttcaaccatacattatcgttcaaggaggaaaacagatgtcttcacatcgccaaagctatttaccagcgctgctggcattagccgtcagcgcttttgcgatcggcacaaccgaatttatcagcgtcgggctgctgccgcttatatctcaagatctgcatatacctgtgaccacggcgggacttaccgtttccatgtatgctctgggcgtgacattcggcgcgccggttttaacgtctctcacatccggcatgtcgcggaaaacgctgctgctctgggtgatgttaatttttatcgccggaaatacactcgcagcgagcgcttcctcaatcggcgtcttactggcggcacgggtcatttcggctttttcccacggcattttcatgtcaatcggggcaacaatcgccgccaatatcgtgccggagcataaaagagcaagcgcgatttctatcatgtttacggggctgacggtggctacggtgaccggcgttccattcggcacctatctcggccagcaattcggatggagaatcgcatttgccgtcattgtggcggtaggaatcatcgcattcctcacaaacgcgcttctcgttccgtcacatttgcgcaaagggacgaaaaccgcatttgccgagcaggtcaaactcgtcacaaacggccggttattgcttttatttatcattaccgcgttaggctacggcggaacgtttgtcgtgtttacgtatttatctccgcttcttcaggaggtaaccggttttcagaaagaaaccgtcgcggccatcctgctcatttacggaattgcgattgccatcggaaacatgattggcggccgtttatcaaaccgaaatccgctgaaagccttgttttatatgttcattgtccaggctgctgtgctgtttgttctgacttttaccgcgccgtttaaaacagccgggctgatcaccattattttcatggggctgttggcgtttatgaatgtgccggggcttcaggtatatgtcgtgatgctgagtgaacgttttgcgccaagcgccgttgatacagcatcagcattaaatatcgcggcatttaatgccggaatcgcgatcggctcgtttgccggcggaatcattacagactcaatcggaatcattcataccgcttggatcggggcgctgatggtgctcagcgcggtcgtattaaccggatggagcaggaagcttgaaaagcgggatcgcactgcccttgaaaggaggtgagtttttcttcagcgcattttgattgtttcaacagacaactaataggaggaatatatacatgacaacacatttacaagcaaaagcaacattgcataacggagtagagatgccttggttcggcatcggagttttcaaagtagaggaaggcgcggaactcgtcaacgcggtgaaaacggcattggtgcacggctatcgcagcgttgataccgccgcgatttacggaaatgaagaaggtgtcggcgaaggcatccgccaagggctgcaagaagcgggattaaaacgtgaagacatttttgtcacgtcaaaagtgtggaatgccgatttaggatatgaagaaacgttaaaagcgtttgacacaagcttagaaaaactcggtttagattatttggatttatatttgatccattggcctgtcgaaggaaagtacatcgatgcgtggcgggcgctcgaaactctctaccgggatggacgcattaaggcgatcggggtcagcaatttccaaattcaccatctgaaacatctcatgaaagagacggaaatcaagccgatgatcaaccaggtggagtaccatcctcgtctgacacagaaagaactgcttgctttctgcactgaacaaggcattcagcttgaagcgtggtcgccattgatgcaaggtcagctgcttgatcacaccgtcttacaggaaatcgctgagaagtacggcaaatcagccgcccaagtgattttgcgctgggatttgcagaacggtgtcatcaccattccgaaatcaacgaaaaaacaccgtattgaagaaaatgcaaatgtctttgatttcgaactgtcagctgacgatatgaagcggattgatgatctgaacgaaaatctccgtgtcggtcctgatcctgacaattttgatttttaaccagaaaaacaccgttcggctttccgaacggtgtttgtttatgcccagccgctcaatacttcctcaagctggtgctttgtatattcaagactgccgctgttatcaatgacggcgtcagctttttttgttttatccgctaaaggcatttgcgacgttatccggctcatcgcttcttcttctgtaagggaattccgctccatcagccgtttaagctgaatgtctgccggtacggtgacgacgagcaccttgccgacaagataatcaagcccgctttcatacaaaagcggtatatccaaaacgacgaactgctcttttcgcgcaacggcttcatcccgctgtttcagcatttccgcacgtactgccggatgaacgatctgattcagcttcagacgcttctgttcgtcagtgaaaacgatagaaccgagtttttttctgtcaataccgccattttccagcaggatgtcttttccgaatgcctccacaatttgtccgtaagccggcattcctttttccaccgcctgttttgcgatgacatccgcatcaatgactgttatttttttgtcgatcagcatacgcgctaccgtgcttttgccgcttgcgatgcctcccgttaaaccgatgaccaagctcaaaaagcccactccttcttacattttccaaatcccgatgataatcagcaggactcccggcaaaaatgtcattttatctatccaattccatcttgaaagcaaatgccccgcgtttatgccgagtgaaacaaacagcgagctcatcagcccgacagtcacgctcatcataaccggagaaaagccgagaatggccgctcccagcccggcgccaaacgcgtcaatggataaggcgataccgagcagaagcgcctcgactccgttaatggttccggattgatcaatatcggcgctggtcggttttttcaaaatatgaatgacgatgccgagcgatttcacttcaagattaagtaacgttttttcatgcaataagtaatccggctctttagccggtttgaaaaattgccagatgacccatgccccgattccgattaagatcagtccgcccagtttttccgtgacggatacgggaaaaatctttgtcagaaaatggccgatcagcatggatataaacatcacagaggctgaacagcaagcgatcacggcaatcgctttgaacgggattttcatttttctcaaaccatacgtaaacccgactgaaaaactgtccaagctgacagcaaaagccaaaagcagcaaagaaacaatctccatatccgtttctccctttctcttgatcggcaattgtgacatatgcctattgggtgaatcacaatatatatatggagaaaggtcatcaactgtgttagaaaaaagtcattctgctgcgcctgcttgaaccgcttcagttcatgattttttttggcagcgggcgcaaaaatgcgtaccccttccgccgaccacgattttagaaatcatcgtgccgcacgttttgcacggttcatcctttttgccgtatacgtaatgtttgagctgaaacattccgatttccccttgagaattgatataagaccggacggtgctcccgcccgcgtcaatcgcttcctgaagggtgtctttaatttctgtatgaagcgtttttatctgcccgtctgacagactgttcgcttttgtctcaggatgaatacgcgcccggaataaagcttcatcgacataaatattgccgaggccgacgaccgctttttggtcgagcagggcggttttcaccgcgcggttcgtttttgcaagccgctcttttaaataagcagcggtaaatgcttcatcatcgggttcgggcccgagctgtgaaagcggtaatgcattcaattcctctcccggcgcaaacaaatgcatcgtgccgaatttccggacatcccggtagcggagctgtgttccgtccgtcatgtgaaacacgacgtgcacatgtttatcgtcaggctcatcggcctgatgaagaccgtatttcccctccatccgcaggtgggacaccatgacataatgatccagatggaaaagcaaaaactttccccttcttccgatggatcggattgtttctcctgcaatctgccgcgcgaattcctccggctcggcgggttttttgatgatattcggccatctgatatccgccgattcaatcgttttccccttcacaagaccggtcagagtgcgccggaccgtttcaacttctggtaattccggcacaatcatcacttcctttttctctgtttattttgcatcgtaccaagacggccctgaagcataatccgccttcagcggcacgtctaatgccaaagcatgctccatcacttcaggaaccagcttctctaatatttcaatttcttccttaggcgcttcaaaaatcaattcatcgtgcacctgaagcagcagtcgcgccttcaggtttttttctttcagctcagctgccatgtcaatcatggcttttttaataatatcggcggcgcttccctgaatcggcgtattcatggccgtccgttccgcaaagctccgcaggttgaagttgcggcttgtcagctcaggaatatagcggcggcgctgcataagtgtcgtgacatatcctttttgcttcgcttcctgcaccgactcttccatatatgccttgacgcccgggaagctctccaaatagcggtcaataaaagcgcccgcttctttccgggtgatgccgaggttttgcgacagcccgtaatcactgatgccgtaaacgatgccgaaattgacggcctttgcctggcggcgcatcgcttgtgtcacttcatcttcactgacatgaaatacgtccatggcggtttttgtgtgaatgtccatgtcattcgtaaacgcttcgatcagattttcatcttttgaaatatgcgcaagcacccttaattcaatttgtgaataatcggcggcgaaaataagccagtccggttcggacggtacgaaagcctggcggattttccgcccttcctccagccggatcggaatattttgcaggttcggatctgttgagctgaggcgtccggtttgagtcaatgcctgattgaatcgtgtatgcaccttatgagaatccttgcgtgtgactttcagcagcccttctatataagtcgattggagtttgccgatttgtctgtattgcagaatgtgcgcgacgatatcatgtttgtctgcgagcttctcaagcacatcagctgaagtggaatagcctgtttttgttttctttactggcggcaggccgagcttttcaaacagaatgacgccgagctgttttggtgaattgatgttaaacggctcaccggcgatgtcatggattttttcttcatattctttcagcttcgccttaagctcttcgcccattcgcttcagtctttcaacatccactttgacgcccattgattccatttctccgagaattagcgcaagcgggagttcgagatcttcatataattcaagctgattattttcttccaaagcgtcaagcagtttgtcacggaggctgttaacggcagacgctttccgcgcgagatgatcggcaagctctttttcagccggaacggcgcgctttgcgccttttccgtataccgcttcatcttttgaaacgatattcagcccgtattctttcgctacgctcgcgacatcgtcgtacgaattgcccgggtttataatgtaggcagcaagaagcgcgtcaaattccgttcccttcagctcaattccctgccagcgcaaagcgacgacggaacgtttgctgtcgaacacccactttttcatcgattcatcttcagcccaagatttaaaagcttcagactgaatggcgatttctttcggaatataataaagacctgtttcattcacgatggaaaagccgaggatcggttcttcgtgatagttatcaccgatttgttcgacgaccaaagcggacggcgaaacgagcatatcttcggtgatttcttctgccgtttcaacattgatgtcttcaaaattttcttccgccgtttcgccgctttcttcaccgagccgctcaagaagcgtattaaaaccgaggtctttaaaaatggcaacaacttgttcacggtcaaacccttggtaatctaaatcttcgggcttgacttcaatcggcgcatttgtcataatcgtcgccagctctttgctcatcagggcttgttccttatattcttcaagcttttcttttaatttttttccgctgacttcatcaatggaatcaagcagtttctcaaccgaatggaactgctttaaaagcttaatcgcggttttttctccgacgccggggacgcccggtatgttatcggatgaatcccccattaatcccttcatatcaatgatttgcaaaggggtcagaccgtacttttcttgcacgtgctccggcgtgtaatcttccacgtcagtaatgccttttctcgtaatggcaacggtcgttttcccggttgcaagctgggttaagtccttgtcccccgaaactacctttacttcgaagccttctttttcagcagaaacggcaagggtgccgataatatcgtccgcttcatattcaggaagctcgtagcggctgattttgtaggcatcaaggagctcgcggatgaacggcatctgttctgaaagctccggcggcgttttttgtcttccgcctttatattctttaaacgtgctgtggcggaaagtggtttttcccgcatcaaaagccaccagcatgtgggtcggcttttcatcttccagcattttcattaaaatcatcgcaaacccgtatacggcatttgtatggatgcctttttcattgcttaaaagcggcaatgcaaaaaacgcccgatacgccagactgtttccgtcgacaagcactaatttttttcgttccgtcattcaatatcctcctaagagcaaaagctcgtcattcctctattttttaatctcacagcttctcttattttaacaaagttcaattttaaaggaaaatgagcgaaccccgtgaaaacgcaaaaaaggacgggaacaagaaaacacgttcccgccgtcaaaattggctccttggatgaaggggttctgttatatcctaacaagataggtttaacaggtcatgaagaaattgttaatcctttgtaaagctgatcacgcttccggctgccgcttcagcgtcacggtaaacacagtcccctgccccggctcgcttgtgacctcgattttaccttcatgggcttctattaagtgtttcacgatggcgaggccgagcccggttcctcccgagttgcggcttctgtctttatccacgcggtagaatctctcaaatatccgcgggatctcttccttctgaatgccgattcccgtatcggacactttgatatcgacaacggtttctttcacatgtaccgaaatccccaccgtccctttttcaggcgtgtaggtcagggcattgttcgccagattcaaaaacacctgcttcagcctgtgcgcgtcacccgtcacaaaaatcggctcttccgggagatcgagctgaaagctgatgcctttttccgcagccttatgccgcaaaagcgcttcaatttcatgcagaatttttgcggcgtcaaaggactctacgcgcatcgtaaagttttgctgctccatcttggataaatccagtaaatcctgcacgagagattggagccgctcactttctttcagaatgatagacagaaagtctgaaagcgccttttcgtctttcatcgctccgtctaacagtgtttccgtaaatcctttaatcgaggtgatcggtgttttcagttcatgggagacattggcgacgaagtcctttctcatctgctccaattttttaatttccgtcatatcgtgaaagacgaggacgatgcccttccattcatcgtcagggcccatgatcggaacgccgtcaacttcaaagtagcgccgctcaatgttgatgggaagtctgagcagctggcattttttcgtctccgtcataaaaatgtcttcgacaagccgaatgatctcctcatgttcaaacgcatcatggtaaaggcgccgaagcagacgttcaggatttgtatgaaactgcttcgtgtatgaccggttcacgagattgataaaacctctcccgtctattaaaatcaaaccggatccgatattttcaatgacggttaacagacgatcgcgctgcatatcctgcgttctcgtcatttccattaaatcgaccgccaggctgttcatcgcacgcccgagacggtccgaccgccttgcgtaaccgctgtaggagcgggcgtcataattccccttggacagctccgtcgccacctttgtcgcggcgtcgattgattttttgtaacgtgacgtcatgtttgtataaaagaaaacgataatgataaaagcggtacaaagacttgctgccagcatgccccacatttctccggtaacgcttgaaccgtcgttgatatccgaggaaacgagtacataccccgcaattttcccggcgtcattttttacggcagtgccgcggatgactttgcttttcgactgtacggcttcctcgcttttattgtgagaaatgaactcctttacggctgaatcatcagcacgactgccggaatgatatacggcgtcacccttctcgttgagcacggagacgtttataccgagggtgcggccggcgtcacggattaccgtttcattgcttttattgccgattcggccggtgtcaagaaggcccgctatgtataccgattcctttttcagctgatccgccgttctttcttcagcggatgaagaaataagctgctgtaaaaaaaggccgagaacactgaaaaccaatatgatacatacaacgagtaaagcgaacagacgcacacggactttattcattcatttttggctcctccagtttataccccaaacctctgattgttttaatatagatgggttttttggtatttgattcgattttgtcgcgcagatggctgatatgaacgtcaacaatccgggtatccccggcaaaatcatagttccagaccgcgctcagcagaagatctctcgtcagcactcttcccttatgttttcccaaatacacaagcagttcaaattctttaggcgtcaattccagctgttctgacttaaagtaagcttcgtaatgctccggaagaattttcagctcgccgatgaggatctgcccgtccttttcctcttctctgccttgtgccagcgaagaaatgtcggcccttcttaaaatggctttcacccgcgcagtgacttcccgcggactgaacggctttgtcatgtaatcatccgctccgagctccagtcccagcactttatcaaactcctcatcttttgctgtcagcatcaagatcggaaccatcattttctgctgtctgagctgtttacagacgtcgattccgtccactttcggcagcatgacatccagtacgattaaatccggattttcgttctctgcctgctccagagcctcttcgccgtctgatgcggtaatgacatcatagccggaccgttccagattatactgtaaaagagtaacgatagattgttcatcatctacaactaaaatttttttgttcatgctgcgccctccgctgtctattttccccgacatccaattttctctattttatgtgctgcatatcactttatgatttcattttatccaatactgcccgttcagacaattcgcctttttgatcattttcagagaaaggatcgctcagggaaaaagaaaacgctttcattaattgtaaaaagaggaaggcttctgattcggaagccttcccttttttcttatgacaatactttcatcacgtttttgacagattcaactgatttactcagctgcgctttttcatagtctgtcagttcaagctcgatgatttgctctaggccgtttcctccgataatcgtcggtacgcctaagtaaatgccttcatgaccgtattcgccttctaagtaagcgatggtcggaagcacgcggcgctgatctttcaaaatggcttctaccatttcagtcagtgatgcagcaggcgcgtagtaggcgcttccgttgccgagaaggttgacgatttccccgccgccttttcttgtgcgttctacaatcgcatcaagacggtctttcgggataagcgtttcaagcggaatgccgcccgcataggaataacggacgagaggaaccatgtcgtcaccgtgtccgccaagaacaaaaccggtcacatcttttacagacaggtttaattcttcagcgacgaatgttctgaatcgtgcagtgtcaagcactccggattgtccgatgacgcgttctttcgggaagcctgattctttgtacaccgcatatgtcatcgcatcaacagggtttgtcaatacaacgataatgcagtcaggagaatatttcacgatctcacgtgtgacgcttctcatgattttttcgtttgtagatacgagatcatcacggctcatgcctggttttctcgcaattccggctgtgatgacgacgatatcagaaccggctgtgtcctcgtagttggacgtgcctgtgattttcgcgtcaaatccttggaccggacttgcttcgagcatgtctagcgcttttccttttgtcgggttttctaattgcggaatatcaacgagcacaacgtccgcaagctctttttgagctgtaagaaaggctgttgtcgctcccgtaaatcctgctccgataacagaaactttactgcgtgtttttcccatgattctcttctccttttttggcttcattagaagtctgctttaggttcagtccatgtttttgattagctcttcaccaaactctgaacatttcacttcagttgcaccgtccattaatctagcaaaatcgtacgttactacttttgaagcaatcgttttttccatagatttaatgatcaagtcagcagcctcattccagttcaggtgttcaagaagaagcactcctgaaaggatgacggatgacgggttgactttgtcaaggccggcatatttaggagccgttccgtgagtcgcttcgaaaatcgcatgccctgtttcatagttgatgttcgctcccggcgcgattccgattccgcctacctgagcggcaagcgcatcagagatatagtctccgtttaagttcattgtcgccacgacgtcgaattcgctcggacgggttaagatctgctgaaggaaaatatcagcgatgctgtctttgacgatgatttttcctgccgcttccgcgtcgctctgcgctttatcagcagcttcttttccgtctttttcgacaatgcggtcatattcagcccaagtgaatactttatctccgtattctctttcggcaagctcgtaaccccagtttttaaatgccccttcagtgaacttcatgatgtttcctttgtggacaagcgtgacagacttacggccgttttcgatcgcatactcaatggcagctctgactaagcggcttgtgccttcttcagaaacaggtttgatgccgattcctgacgtttcagggaaacggattttgttaacacccatttcattttgcaggaagctgatcagcttttcaacctcttcagaacctttcgcatactcaattccggcataaatatcttccgtattctcgcggaaaatgaccatatccgtatcttcaggtcgtttgaccggagaaggcactcccgtgaaatatctgacagggcgcaggcacgtaaacaaatcaagctcctgtctcagcgccacgttcagagaacggataccgccgccgaccggtgtcgtcagaggacctttgatggcgatgaagtactctctgatgtcttccagcgtttcggcaggaagccactcacctgttttattataagccttttcaccggcataaacttctttccacgtgatttttttctcgcctttatatgctttttcaacagcggcttccaatactttagaagcggcgttccaaatatcagggcctgtgccgtcgccttcaataaacgggataatcggattatttggtacgtttaatactccattagagactgtaattttttcaccttgtgacacaatattacctcccagtatgtaattcatatttagaaaacattttatttttcttgtatagaaaataaaatgacttttctcaagattctatcaaaattgtaaaccaatccgggcttgattaacaagaggctaacgacatgaaaatcaccagcctcccgtttgatcaggctctttcatcaatcggaacaaaagtctgcttatccggacccgtgtaatcagcgcgcgggcggatgaggcggttgttatcgtactgttcaagaatatgggcgatccatcctgacattctgctgaccgcaaagatcggcgtgaacagatcgtgatcaatgccgagactgtggtatacagatgcggaatagaaatcaacgttaggcggaagttttttctccgacgtcacgatttcttcgacacggattgacatctcgtaccatttgctttcacccgtcagattcgtcaggcgtttgctcatttcttttaagtgtttggcgcgcgggtctccatgcttatacacacggtgtccgaagcccattactttttcctttttctccattttgctgcggatataaggctcggcgttttccacttcgccgatttctgtcagcattttcatgacggcttcattggctccgccgtgaagcggcccttttaaagcgccgatggcggcagtgatgcctgagtaaatatcagataaggtggcgacacatactctcgccgtaaatgttgatgcgttcagctcatgatccgcatgaagaatgagcgctttgttaaacgcttccacttcgatcggagaaggctcttcaccgtttaaggtgtaaaggaagttctccgcgattccgtactcttccttcggttcaacaggatcaagtcctttgcggattcttgagaaagcggcgacaatgcccggcactttcgcctgcagacggatggcttttctgtagttcgcttccggattcatggcatcggcttcactgtcagtcagaccgagtaatgaaatcgccgtccggagcgcagccattggatgtacgttattgaggggataggatttgaagtgctcaatgatttcttgtggaacggcagcttctttcgcaagctgttttttcagttcagcaagttccgttttattcggcaggcgcagatgccacagcaaataaatgatttcttcaaaacttgcattctctgtcaagtcgtcaatatcgtaccctacatatgtaagggtatcgtcgataatagagcttacagatgatgttgttgctacaaccccttcaagaccgcgtgttgctgtcatattcaacctctccttttcaatcaaaattcccctttaaagagtatataaaacatacggcttacttaaaatgagtcatgcaaacactccctttccccttcaagaaaatgcttacatttcactggttgcggttacataaccgatatgcttatagaggaacataacaaattcttataagcttatttaagtttaagcctattcttattataaacaataatctgattaatttgtagacttttaactaaaaatgttttaaaagccctatatatcaaggcttggcgttgataaatttaatcgtttgctttcaggcgctttgtaaaaccatgtattctcatgttttcatttgggggagttttggaggagactttaaaaggacaggcgcgacaacttcaccgcaaatttaacccccttctttaccggagaagggggttattttgtttactcgactgaatcaatgttcggatcagcttcagaaatccaggtcttggttttagttggctccccgcacatggactggaatcgtttgactgcatttgcgctgttttcgggctgtaaatatcctcatcaaaccgttcatcaattgaaactgactcatttactgatataagtgaatttaaataaattgcagaaaaaaccctcctcatctcgagaagggctctgacttatactttttttctctaaatcagtccgaagaaactaactgatgccgctcaacttttcaatcgaagggcttcatcgggttctccaactatttgcccctatgcttttcttttgctttttgttttctgattaaatatttttgttcctttatcttttctctttgttttctattcagttgttttttcttttcttttcttgcttcaagctcctgttttatcgctttttgtgccttagttgatatcccgatatttttcatttctttagaagcttgtcgttgcaatctttttgggtttaatttcttagattttgctttaacacaaaccccttcttgttcagtgtgggagagagtctgtaaaagttgattattaacaaaatgcattatttctgaatcctttggctcttgtccaaacaaatgacgaattgctcttaatttcccgtcattcacaacttcaatgactcctacccaaaactgaccatcgtagtaaaccgttaatttcataacgattccctcctcctaaatttactgaagaatgatggacatcccgaggaggggaaggttactgacattttaaatcatgcatccggactaccaaccgaattgtgttttttcattctcattataaatttaacaaactttcaaattgaaggaaagggtctccgcttattttaacaacacttcaagttttgctttggtatcaggcccataaatcccatcagcttttaatctactgcaatcgctgttttcgctccatgtgcgccgtcaatcccgaagctctttgttacatggtaagccgcttcattcatcggaataatgtaaatggcatttgtctgaactacaaaatgcgcaagtgcaaactctaattttctccacaaaaaaagcagctttacgccgcttttttactttacgaagtgaatattttaacgatttgcatggccaagtaggcgattccggcgccgattaacgggcctacggcgacgcctccgaaaagcgcgacggcaagtatcgtgccgatgaccagcgccgttgtaatatgagggtcgttttccaataaggtgagaccgtttttggcgattaaggcaaccgcgatcccggcaccgagagcgatccacgcataatatgatttcatcgcttctccgagctgtttaaaaccgatatcacctgtggcaatcggcactaaaacggcgattgtaatgacggtgaccccccagttgatgccttttgactgaataaccggaaatagtttctgatcaagaccgacagcttttatcacaatgagaaagccgacggcaaaaagcaatgactgatttttggctaccaatgcgatggccagcaataatagtaaaaataaattcgcctgtgtaaacatcctgaaagcaccttctttcatcatatctgtattcatatccttttttttgacgaataaactaatgtaataggacgtgccgaccgagaggaggatcgatgtgaacccgcactatgcaactgtttttttccgcgcgctgtttgtactcgctgcggccggcggcgctttagcggccggttacgcctcatttccgttaacttatccgtttctgatcgcccttattctgtcatcagcgatcattcccgttgttgactggctggacaaactgacggggatgccccggtcagtcaatacagtcattgtcctggtcttctttttgcttattcttcttggcgcgacgacatttctcgttgcggaaatcatttcgggaaccgcctatctggccaaaacgctccctccccatatcagcgcctttatgacgtattgcgaagagctgttcacttcccgcattcagccattgtaccacgagctgaccgtcttatttaacggactggaaaccaaccagcaggcatccatcgtgacgcatatccagaccctcggtgatacagccgctaaaaatgcggggctgatgctttcacatcttttggagctggtgccgaaatggattgccttccttcccaatacagctgccgtcttcattttcgcaatgctggcgactttttttatgacaaaggactggcataagctgaaggcgctgctttattccattcttccggaacgggtttcagcaaacgccaaggccgtatcgggagagctgaaaaaagcgatggcaggtttcattaaggcgcaggccgtgctcatacttttcacgatgatcattgtctttatcggactttttcttttaggggttgagcatgcggcaaccatcgccttttttatcggcctggtggaccttctcccgtatctcggcgccgggtcggtctttgttccctggattatgtatttggccattgccggtcagcttcctcaagcgatcggtctcggtgttttatatattgtggttcttatccagcgccagctgacggagccgaaaattttaagcaagtcaatcggacttgatccgcttgcgaccttaatcgctctgtttgccggctttaaattgttcggaattttaggactggctgcggggcccgcgctgctcgttttcattcaggcctttatcacaacgggcgctttaaaagaaatatgggcctatattactgttcagtccaaataaaaacagcagccctgtaagaaggctgccgtttttatttgataatgatccgcttgttttttgacattcctctcagccatttgaacaaaagcggcttcatgcggttccgagtgaacggaatcagaagacaggcccctgcaatatcggacagaaaacccggaagcatcaaaagcaggcctccgaaaaagacgcatattccgtcaagaagcgcttcccccggcattttgccgtgctgcaggccgcgcatcacccgatgatacacatcggttccctgtctttttgccaccaaggcgcctaacacgcctgtcaaaatgatgagaaggaaggtcggaaaaataccgagccattttcccgccagcagaaacaaaccgatttcaattgccggacacacgataaacagtaagaataacactctcatttttctgccctcctgcccttctaaaagcgcgtcaccgcccgcatgggaataggaaaatcagcctaaagacaaaagagaagggagaacccccctctcttttttaaagctgtttaaagaacgcttgcgcggccttcatacacagcgccgcgggcagcgtcaactgtgataacctgtccttctgttaaaactgaagttgcgttctccagaccgacgataaccggaatgcccaagcttaaaccgacaacggctgcatggcttgtcagaccgccttcttcagtgatgagcgctgatgctttttcaagtgaagcgatcatgtcgcggtcagtgcttgaagcaaccaatactgcgccgtctgtcattttttgttcagcttctttcgcattttttgcaacaacgaccggaccgaaagcagatttgcgtccgatgccttgcccttttgcgataatgctgccgacagtgtggactttcatcagattcgtcgtgcctgattcaccgacagaacctgctgtaatgacaatcagatcaccgcgtttcacgatgccgctgtcaagtgatttttgaaccgcgtcttcaagcatttcatcggttgaattcgcgttttggccgcttgccggaaatacgccgaatacaaggccgagtttgcgtgatacagactcattaaccgtaacggctacaatcggagcctgcggacggtatttcgcgatcatacgcgccgtatggccgctttctgtaggggtaacgatagctgccgcactcagattgattgccgtgtgcgcaactgattggccgatcgcatcggtaatcgtcatgccgacctgatctctgcgtttagacagaatttctttgtagttcagagattcttccgtgcgtgtggcgatgttaaacattgtttgaaccgcctcgacaggatattgtcctgcagccgtctcaccggaaagcatgatagcatctgtgccgtcgaaaatggcgttggcaacgtcacttgcttcagcgcgtgtcgggcgagggttgcgctgcatgctgtcaagcatttgagtcgcagtaataaccggtttgccgagcgcgttgcattttttgatcatttctttttgcacgagcggcacttcttcggccggaatctctacgccgaggtctccgcgcgctaccattaagccgtcagatacttccaggatcgcatccaggttgtccacgccttcctggttctcgatcttaggaatgatttgaatgtcagacgcgttatgctcttcaagcagttcgcggatttccaggacatccgtagaacggcgtacaaatgacgcagcgatgaaatcaacgccttgctcgataccgaatacgatgtctttggcgtctttttcagtaattccgggaaggttgacgctgacgccgggaacgtttacgccttttttatttttcagcgtgccgctgtttaagatttttgttttgatttcgtgtttttccggatttgattctagcacttccaatccgattaaaccgtcatccaacaggatgatagaccctgctgacacgtcgtctgccaggccttcataagaaactgagaatttttcaagcgttcccagcacctgtttcgtagaaacgataatttcatttcccgcctgaagctcaagcgcgccgttttccatatcgtgcgtgcggatttccggacctttcgtatcgaggagaatccccacgtttttgccgagctttttgcttgcttctctgatgtttttgattcttgcgccgtgctcttcgaaatcaccgtgtgaaaaattcagacgagcaacgttcatacccgcttccatcaattttgtcagcatttctacactttcactggccggaccgattgtacaaacgatttttgtttttttcaactcgttcacttccttctgaaatcttcagcttcttccgccttaaatagacagttcttttgaaagctgatacatgtttggttcaacagtatgttttgattctaaaatttctataatatcatggtctacaagcttgttgttttgtatacctacgcagcgtccgccttttcctttaagcagaagctcaaccgcgtaagcgccgaggcggcttgcaagaacccggtcagaagcgcttggagatccgccgcgctggatgtgccctaaaacggatacccgtgtttcaaggttcgtttcttcttcgatgcgttttccgaattcaaccccgctgcctaccccttctgcaacgatgatgatactgtgttttttgccgcggtcgtgccctctcttcaaacggccgataatttcctgcatatcgtagtccgcttcaggaattaaaattgattccgctccgcctgcaagacctgcccataaagcaatgtcgcccgcatggcgccccatcacttcaataacgtatgtacgctcatgagacgtagcggtgtcacggattttatcaatagcatcaattacggtatttagcgccgtatcaaatccgatcgtaaaatcagttcccgggatgtcattatctatcgtacccggtacacccacacacggaaacccgtgttccgttaattttttcgcacccatgtatgaaccgtctccgccgatgacgacaagaccttcaatgccgagtttctttaaattttcgattcctttttcacggccttcaactgttttgaattcaggacatctggccgtgtacagctttgttccgccgcggtggatgatgtcaccgaccgaaccaagctccagtttctctattttaccgctgattaatcctgaataaccgttataaattccgtacacttcgacgtcgtggtagatagctttccgcacaaccgcgcgcaccgcagcgttcatacccggggaatccccgccgctcgttaaaactcctatacgcttcatttcctattcacctcagcaacatatatatgttaaacatatcatgatcattgccctaaaacaatgaaaagggacgcctgagctcccatgaaaccttacctattatacaattaaataaattgtttttaaataaaatttaaggaatatcacaaaaatcacaaaaaataaacgtgagccataggcttcacgtctattcagtttaccccgatatattgatcctcaaccgaaactttcccgattgctttatatttttcatatcgctgtgagatcaattcttcggcgttcaattgaagaagagattttaacgtttctttaagtataccgtcaatgtagcccgcctgctgcttaatatcatggtgagctccgcccttcacttctttaatcatatcatcaataattcctaattctaataaatcgggcgcagtaatcttcatggtttcggccgcttttttcgcaaggctggagtctttccacaaaatggatgcggctccttcaggagaaataacggaatacgtcgagttctcaagcatcagcatgcggttgcccacacctaacgcaagcgcgcctccgctgccgccttccccgatgacgatacaaacgacaggcactgtcaggccggccatctcgaacaggttcttggcgatggcttcactttgtccccgctcctccgccgctttacccgggtacgctcccttcgtgtcgatgaagcagataatcgggcggttgaacttatccgcctgcttcatgagacgaagcgctttgcggtagccctcagggtgaggcatcccgaaattgcggacaaggttttctttcgtgtcttttccgcgctgatgtccgatgacggtgaccggcatgccgtgatatttggcgactccgccgacaatcgcagcatcatctccgtatgttctgtctccgtggcactcaaaaaagtcggtaaacaggtattgaatgtaatcaagcgtcgtcggccggtcgggaaggcgtgcgatctgcactctgtcccacggcttcaggtttttataaatctcatcctggagcttgctgagccggtcttcaagtcttgcgatttcagcgcttaaatccatctccgaatcttgggtgaattttttcagttcggcgattttcgtctgcagttcaatcactggtttttcaaattctaatcttgcagccactcatgctcacctcctgtttggtgcatgtccagcagaaatgcgagtttgtctttcatgtcgtttcggtgaatcaccgcatcaagctggccgtgctttaataaaaattccgccgtctggaaatcttccggcagtttttccccaatcgtctgttcaataatacgtcttccggcaaatccgatcaaggcgcccggttcagcgaaattataatcaccgagagacgcgaaactggctgatacaccgcctgtcgtcggatgggtcatgacagaaataatcagtccctgctcctcactgaacagttttaatgcagagcttgtctttgccatttgcataagacttaagaccccctcctgcatacgtgcgccgccggaagcggtaaagatgataaacgggactttttcctcttttgctttttcaattgcaagcgtgattttttcgccgacaaccgaacccatgctgcccattcggaatgttgaatccatgatcgcgatcacggcagggaatccgctgatggttccttttccggtaaccaccgcttcattcagcgatgttttctcacggtctttttcgattttttctaagtattccgggaaaccgagcgggttttcagatatcattccctggttgaattcttcgaatgaatcttcatccaggaggctttcaatgcgctgctttgcattcatcgggaaatggtgcccgcagttcatgcagacgcgcaggtttttatctaactcttttgtgagcatgatttttttacatttggagcactttgtcataatgccttccggaacatcatgttttgcctgctcagacggcacggaagcatattttttcttttttgtgaatatatcctttaacaaatgattacctcccttttgtgaagggttctcttcactgcatgtcttccgattagatagacttaataataactttaccgaaactattgtactttttttgtcaaacggtgtcatcctccattcgacattttttgctgcaaaacagacggaaacggacggatttcataccgtgaaaagcgttgttcagccttatctgtcagcgttttcaaaagaaataaggattctgctgaaatttttttaagacctgcccttaaaaaaatgccagcagtccgtatattgaacagcagcgcgttgtttttttccaacgcgctgccatttcatttttgtgttattattcgccgatgaccgtaagctgtcttgttttttcagccacttcctcaggatcgaccgtaattctggcgacgcccgtttccatcgctgctttcgcaacagctttcgcaacggcaggagccacacgtttgtcaaatggagccgggatgacataatcagcgcttaattcttcctctgtaacaagggaagcaatcgcttcaaccgcagcaattttcatttcttcgttgatgtgagtcgcgcgaacgtcaagcgccccgcggaaaattccagggaatgccagaacattgttgacctggttcgggaaatcagaacggcctgttccgattacgcttgcgccggctgcgcgcgcgtcttcaggcatgatttccggattcgggttggccattgcgaagataatcggatctttcgccatgctttccaccatttctttcgtcagcgcgccttcgactgatacgccgataaagacgtctgcatctttaatgacatcctgcagcgaaccatcgttgcggtcttggtttgtaaacttcgccacttcgtttttcactgcgttcatgccggccggacgcccttcgtaaatcgcccctttagagtcgcacattacgatgttgcgtacgccgaaatggtaaagaagcttgatgatcgcgatgcctgccgctcccgctccgtttgccacaactttaatggatgacatggattttcctgataatttcagcgcgtttacaagtccggcaacggttacgatggcagtgccgtgctgatcatcgtggaaaaccggaatgtttgtttcttttttcaggcgctcttcgataatgaagcagttcggcgccgcaatatcttcaaggttgacaccgccgaatgtcggtgcaagcagcttcacagtgtcaatgattttgtccacatcgtttgtgtcaagcgcgatcgggaatgcatccacgcccgcgaaacttttgaacagcaccgctttcccttccatgaccggaagtgaagcctcaggcccgatattaccgagaccgagaacggctgatccgtctgttacgactgctaccatgttccccttcattgtataatcatatactttgtttttatcgtcataaatctctttacaaggctcagctactccgggagagtaggcaaggcttaagtcgtccgcgtttctgacttctacctttgcttttgattccagctttccttgatttactttgtgtaaatgtaacgcttcttctcttaatgacattctaaacactccttttaagtactttgttacatattctgccgcatagactggtacaatcgctggaggtgaaaaatttcagaatctttaaataagatagcacaattgtttcaattgtataacaaaacgattattgttaccactattttaacacgacgttttcgcggcccagcagctcttttaaacggtataacgcctgatggtccgcctgaatatgaaaagtatccggcagcctgatcgtctgcttgtctttttcataataaagataaacgccggtttcccctttatgctccagtaaaatacgcttcatcttttccaaaaactcctgattgtgccggctgccttcgattttgatgtaaacagacggcgctctgtctgcctccgtctgctcaagaagagaggcggatgacatgatgaattgtgtcttctcctgacgctcttccatttttccggcggcgaataaaagcgcgccttcttctaacagcggagacagccttctatattggtcaggaaacacgacggcttccatttctcctgtttcatcgcttaatgtgagaaacgccatatgctgacctgtctttgtccgaatcgttttgatgcccgcgagcaaagcgccgattgacagctgccccttcggcatctgccgcgctgctgtgatcgcttgcgccccccgttttttcaggagatccctgaaagcagacaaaggatggcttgagaaataaacaccgagagcttctttttcgaaccgaagcttgtccacgagcggaaattcctcagcctctacatattttggcttaatggagaacgattcttccaaaaacaatcccatttggtcatcgtctgcacgaaaaagttcagcgtgctctaaagccacatcaacggaggccagcaaggcggcgcgattttgattgaattcgtccatggcgccagaaaatataagggcctcgatggttttccgattcacgctttttgcgggtacgcgaaagcagaaatcgaaaagatcctcgaacggtttatgtgttcttgctttataaatatctttcactgccgagacgcctacgtttttaacggcccgcaaactgtatctgacggctccgttttccggcgcaaacggaaaaccgcttttgtttattgacggcggaaggacttgaatcccgctccccttcgcttcatgcagatattgcgatattttgtcctcattgccgatgacgctcgtcaacagcccgcacataaaatataacggataatgcgcttttaaataggcgagctgatagccgatcatgctgtatgcgacagcatggcttctgttgaatccgtagttagcgaattttacaatcagatcgtagacctcgtttgcagtgactacagaatactccttttttaagcacccttcaacaaaatggcttcgctctctgtccagaatgtccttttgctttttgctgacagcccgtctgagcagatccgcttcacctaatgaaaaccctgccatgcgcgaggcgatcatcattatctgttcttgatagacgatgacgccgtaagtgtcactgagaatatttcgtacgtcctcgtgcggcacttccacacgcgcctgcccgtgcttccggtcgataaataacggaatattttccatcggtcccggcctgtaaagcgcgttaaccgcgacaatgtcttccagtcttgacggcttcaggcgtttcagcacgtttctcattcctgatgattccaactggaaaatacccgtcgtatcaccgtttgacaatagcgagaacgttttttcatcctgataagaaatctcagaaaaatcaattttcgtattcgtctctttttcaatcatcgttttaatggattcaataagcgtaaggttgcgcaaacctaaaaagtccatttttaaaagaccgagatcttccaagtgatccatcgcatactgcgttaaatacacgccgtcatgcccttcttgaagagggacaacttcagaaagcggctctttactgagaacgacccccgccgcgtgtgttgacgtgtgccgcggaagaccttcaattttccttgcgatctgaaacactttatgaagaacggcggattcggacagcctcctgttcagctgagcggactgccgcctcgcttcatcaagcgtcattcccggttttgacggaatcaggcgggcaagctggtcggcttctttcgggctgattccgaacactctcccggtatcccttaacgccgcctttgcggccaatgtcccgaaggtgataatctgggcgacgtgcatggccccgtacttattttgtacatactgaatgacctcatcccttctcgtatcagggaaatcgatatcaatatccggcatgctgatccgctcgggattaagaaatctctcaaacagcagagaatgtttaagcggatccacgtcggtaatgaaaagggagtaagcgacaagcgagcctgccgcggacccccttcccgggcctgtcacaatgcccttttcatgcgcgtacttcataaagtcccatacgatgagaaaataatcactgaatttcatgcgcctgatgacgtccagctcatattcaagccggcggacagcgcgctcatcaggagtgccgaaacggaggcgcagcccctcatgacagatctccgccaaatagtcatcggctgatttgccgtccggcgccggaaaagacggaagctgtgtctgtccgaggctgacatcgacccggcattgccgggcgatacgcgcggctgcttcaatcgcttccggatgccgcgtgtaaagctctgccatttcttcaggcgtcctcaagtataagtccggcagattcccgctctgatcctcccacttctctccggctttaatagcgcacagacagcggtacgcatcttgatcttctttcttgatataacggacatcccccgcagcgcagacagcgatttccgtctcggctgacaggcggaggatctcttcggataacgtctcatgtcctttaaacggctggtaccctaaataaaaacggccgtctccgaacagctcccggaatccttcggcagcctggaccgcttcttcaaacttcccggcttgaagcaggctttcaatgtacccgttttcaccgggcgtaatggcgatcagcccctcatgatagctcttcatccattttcgcttcatgccgccctttgccatggattgcagcgcacttgagattttcaccaggttctgatatccggtgtttgtctctgctaaaagaatgagcgggtgtgcttcaagctccgtatcgtccgtgtatatagaagccgtcagaccgataatcggcttcattccgtttgatttgcatgctttataaaactcaatggcgccgtacatcacattttcgtccgtcagcgccaatgatgaatatccgagttccttcgcttgtgtaacaagctcttttacagaagcggcgctgtttaacagactgtagccgctatgtacttgcaggtgaacaaaagacaatgccgccactcctttcccatacgttcattttgcctttctacattataagacgggttttcttaagaaacaaatgttcttttttgactcatcatcatacttgtccgtttcgctcaatatgatagaaaagtgaggtggtgtatatatggatcaggaagccggatttatggcgaatttcatcagcagttattttatcgccctcggtgtgttactcggcggcgcgctgatcggcggcctcggagcttatttatcaggcgagcctccgctgacggcgatcacaaaattggcgaacaggctgaagatctgggcgcttgtcgcggccatcgggggaacatttgacgcggtatacagtttcgagcgggggctgttcgaaggcaacacgcgcgacatcttcaaacagcttcttttaattatttcagcaatgggcggcgcgcagaccggctggctgatcatttcatggctgacccaggagaatatgtcatcatgagaattcccgagtattataaaaaaccgggatggcagcgtttttttgcgggaatgatgtgcggagccatcgtcagctgggtgttctttctgtttacatacggaacgtttcaggaagaacaagtgacgttaattgaaaagcagcgtgagcacgcgcgggatttaaaaaaccaaatctccatctatcagaaggatcttcataaattaaatgaggataataagcaaagacttctcatccaaagtgttgatgtgaagctgatcaatggggaaaaatacagaatcgcccagcctgacaagatgaaatttgaggaacaagtgaaagataatatttctgaagtcatcacaaaagatattgaaagcgtgtataaaacaaaggagcttttaaaacggacgatcgaaaacaaaatatacaccataaatgagaaggaatttaaagctgaagtaaaggaactgacgatttatacgagattgtctgtcgaaattcatatttcttttgcgacgtaattatgtcatttttaaaaattttccatagatctgtcgcttttttctccgcttttttataaactgtagatgagacattttcaatgattctgaagggaggaagggaaaatggaggtttttagtgaacgacgcttggcaaaagatcatgcagcccgaatcagacaaggctattccgcatatgcagaaacagacacactcgcttccctcataaaaaaagaactccaaatctgtaatctccgcgtctacgaagacctgactgatttcggctgctggttcatccccgtgacagatgaacactaagaaagagggtctcccctctacttgtgttcgttacatacctcttccagatcagcaagaatctgatcggtttcatcccagctgaagatggatgcgccggccgcaagcggatgtccgccgccattgtatttccgggcaattccgttgatgaccggaccttttgaacggaaccggactctgatttgatcgtcttcttctacgaaaaacacccaagcgcggatacccgaaatatttccgagtgttccgacaagctgcgacgcttcagaagcggtggttccatatgtctccaaaatgtcttttttaatgaacacggaagcgacgccgttttcagacagtgacacattttgataaataaagccgttaagcttcaccacatttaattttgtttcatacaattgattgaacagctctgacgatgaaaatgggaactcaatgagctctcccgcgtattttaatgtcttttttgtggtgttcgggaataagaagcgccccgtatcaccgacgatacccgcgtagatcagctcagctgctttcgtattcagtttccagccgtgctgctttccttccaggtacagctcatagatcatttcgcttacggagcttgcattcgtatcgacccataacagatcgccatacggatcttcatttggatggtggtctattttcatgagctttgcgccggaatggtagcgctgatcgtcgaccctgccttggtttgcggtgtcgcacacgatgacaagagcatctttataggtttcgtcatccacctcatcgagggaatataaaaaagacaaggacggctcaggctgtccgacggcaaaaatatttttttcgggatacgtttcccgcaggatttccgtaaggccgcactgtgaaccgtaggcgtccgggtcaggcctcacatgtctatgtaagataatggtgtcatataatgatatggttctgatcagttcggatttcatcgttttctccttttcgtttttattcatttaatcatactctttatccatggaaaaggaaaatctttcagcaacggtataaacggttttgcaaactcatataatggaggatttcatttatgctggtttttgtttttctcatcgggctttctgcctgcttttacgtgtattacaaagtaaaaggaatccagacgaaacgggcgctggagaaggaatgtttttcggctaaatcaagtatggcattaggcgcgctggtgcttttgtacggagtaaaccaaatgattctgtttcactccgtcctgaccctggtcatcggcggcgtcttcattttaatcggagcaggcagcgcatgggccgggtataaagcctataagcattatgagcccatccacgcaaaggaagcggagagggaccacgcataatgaatgccaagggacccgggtgcgtcccttaacttctctccatcagctgcaccatgagcatcgcttttgaaacgatgccgctttggcttgacacttccacttccattttcccgaatttccggcccgcctctaaaatgcgcggtttcacttcaatgaccgactccatctgtacgggcttcaggaagaaaatcgtaatgctttcaatgaccagctcgccgcgtttgcgggagcgtaaaaatcggctggcggcctgggttaaaatcgtcgtaaacaccccgtaagaaatcgtgccgagctgattggtcatttgcggcgtgacttcatattgataaacggccggcgttttgtcatcttcgtcttctttaaatccccttgaaacaatatcatccagcttttccccgacctgaggctgcttttgaaccatttgaagcgcttttaagacatcctggcggctgatcattccgatcagtttgtgatgcccgtctgtcaccggaagcacttcaattccttcccaaaccatcatttgagccgctgaggcgacagatgttttcccgatcaccgtgacagggtttttggtcattactttttcaatcggaactgaccggtcatgccccgcgatatctttcgatgtgaggattccgtggattttcatctgctgatcgataaccgggaagcggccgtgtccggtttcatagttcttttcgtaccatttctccagcttatccttaggagacagcgtcactgtccgatctgcgggcgtcaaaatgtcttccacgagcacaatctctttttttatgagctgatcatagatcgcccggttgatcatcgcggctaccgtaaaggtatcgtagctcgtggagagaatcggaagctcaagcatatcggcaagctcgataatgctgtcgtcggtattaaaccctcctgttaccaaaacagctgcgcccgcttcaagcgcctggcggtgggcgttgattcggttcccgacgattaacaggttccccgccgctgtataacgcatcatcgcgtcaagctccatcgcgccgatcacaaacttattcaacgttttatgcagaccggcttttccgccgagcacctggccgtctatcacattgacgacctcggcgtatgtcagcttttcaatattttcttttttcttctgttcaatccggatggtccccacacgttcaatagtggaaacgaatcctttgttttcggcttccttaatggctctgtaagccgttccttcactgactttcatttctttcgcaattcttctgaccgaaattttttcaccgacaggaagcgaatctatgtatgataggatttgttcatgctttgttgccaagcgtttcacctctaaggacagtcttctgcttttattataagggtacgggggattcattcgcaatgagacgcccgaaaaaaggcggcatcacaaaaagaccttctgaatgcttgattcagaaggtctttgacacatatgtcaggcaagctcaatggtctcgccgaccgccatgactttgccgacgcctccgggcagactttcggcgaaagcgtcagggtcctgttcaatgacaggaaatgtattgtaatgaacgggaacgacctgtttcgctctcagccattcagccgcgagtttcgcatcttcagggcccatggtaaagttatcaccgatcggcagaaacgccaggtcaatgtgattcagttccccgatcagtttcatatctgagaacagcgccgtgtccccggcgtggaaaatcgttttgccgtcaatcgtcaataaaatcccggccggcatccccgtgtacgtaatggttttgttttcttcatcagtgaccgccgatccgtggaatgcctgtgtcagtttcactttaccgaaatcaaattggcgcgtcccgccgatatgcatcgggtggacctttaaacctttaaagccgagataaacagccagctcattcggcgcaatgacgagcgcatcgttttgtttagcgatctgctctgtatctccgacatggtcattgtgtccgtgagtaagcaggatgacatccgctttcacttcttccggtttcaaatttgtcagactgtttccggtcagaaacggatcaaaaataatgttatgggttttcgtttccacttgaatgacagaatgtccgtgataagtcactttcatcgttttcacctcataaaaaattaatatttatcaagttccctttttgacaaacgaaaaaacttatagggattgatgcctgttaatcacattcagcccgcctgttgcttcaatgaccgttccggttacaagatcggaatcttcttcacataaaaaggcgatgattctcgcaatgtcctctccggttccggacctgccgatcggcgtcttttctttgccgattttccgtcttgcttcctctatagacgcttctttcatatctcctacaatatcacccgggcagaccatattggccgtaatgcctgattcagcttcttcaatcgcaatggttttcgttaacgaagccaatccgactttagccgctccgaaagcggaacggtgaagccagccgggggcatggtccgctccttgaaaaccgtatgtaataatccggccgaaccgttgctgtctcatgaccgggataaccgctttaaacagatggaaaacggcgcttaaattcccttcaagcatgtcataccattcgtcatcggaataatcggcaagctttttgcgctcaaatatgtacggtccggcattgttaatcagtatgtcaatccttccaaaccgctgaagggctgcatcggcgatccgcatgagatcttctttccgggttacatcgcccttaacgaattgcaatctgtcatggcacccgggataatccgccttcagacaggcgaccgcttcttcgtcttgtctgtaattcactgtgacagaaaagcctttttccagaagcatttcagtcacttttcggcccaatccctttgtaccggcagtgattagagcatgtcgcacattgaataccctccccaggcaacgttgccgcttcaataaaatcaagacgtttctccctctactttactataaacaaacggcaatatcacttttttgcacttcgttcgcacgaaaaaaaagccgtctttacagacagcttaattttctgaaggagcagaggcttcctccatgccgacataaccgctttcgtatgcctctgagatgagcctggccgtttcttcactttctttttcatcatagatgtaacggtcttgttctttgcgcattccttctacctcccatctttatagatgtagggtgtctgatatgacgggaaaatatgaaggaaatttcaacaaattaaatgccggcgcaggcttttgcttttacgagcgcctgttctacctgctgaaaacccgttccgccggcgctcattcttttttcaaccgcatgatgcggatcgagcacggtatagatgtcttcttcaaagagactgctggcttgaaggaattcttcaaatgccatatcacttaaatagattcctttttcaatgcagctgtacacaagcttgccgaccacttcatgcgcttctctgaacggcatgccttttttagctaaataatcggcaagttccgtcgcgtttgaaaaatcttgttttgtcgcttgtttcatgatgtctttgtttactttcatcgtttcaatcatgcccgtgaaaatctgaaggcttccttcaacggttttcaccgtgtcaaacatgccttctttatcttcctgcaggtctttgttgtaagcgagcgggagccctttcataatcgtgaaaagccccatcatatcaccgtatacgcgtccggttttaccgcggatcagctccgccatgtcggggtttttcttctgcggcatcatgctgcttcccgtcgcatacgtatcatccagttcaatgaatctgaattcctgcgagcaccatagaatgatttcttctgataaacgcgaaaggtgcatcatcagcatgctgctgccgcttaaaaactcgagaataaaatctctgtcactgactccgtcaagactgttctcataaatggagtcaaaaccgagcagctccgccgaatagttacggtctatcggaaacgtggttccggcaagcgccccgcatccgagcggcgatatgttaatccgcttcatagcatcgcgaaaacgctctttatcccgttcaagcatccaaaaataagcaagcagatggtgggcgaaagaaatcggctgagcccgctgcaaatgggtgtaccccggcagaatggtctcgacattggcctccgctttttcgatcagcgctttttggaactgttcaatcagcacgatgatatgtgagacatgatctttcaaatacaaatgcatgtcggtcgccacctggtcattccggcttctgccggtatggagcttgccgcctagcggtccgatttcttcgatcagcattttttcaatattcaaatggatatcttcataatcaacagagaattcaagcgttccttcctctgctttttgcaggagggtctgcagcccctgtcggatggcgccttcttcttcttccgtcagaatgccgcattttttcagcattgccgcatgagcgagagaccctgtaatatcctctttgactaagttttggtcgaatgtgatggatgcgccgaactcatcgacccacttttccggtgttttttgaaaacggcctccccaaagcttcttcatgcttcaatctgctccttctttttcacaatgctgtttacttttgtcggcagcccccaaagctcaatgaaaccgattgccgcgtgatggtcaaaagcatcgtcttttgtatatgtcgcaagtttttcgtcgtagagtgaatattccgacttacgtccttctacaatggcatggcctttaaacagcttgacgcgcacgacgccggtgacgtgtttttgggtttctttcaagaatgcaagcagcgcgtcttttaacggcgagaaccataaaccgttatagatgatttcagacagtttttgttcaattgccggtttgaaatgggccacttctttcactaaagtcagatcctcaagttctttgtgagccgtaatcaaagtcatggcgcccgggcactcataaacttcacgggacttaatgccgaccaggcggttttccacatggtcaatccggccgatgccgtgttttccggcagtctcgttcagcttgagaattaaatcagcgagcgggtaggttacgccgtcgattgaaaccggaacaccggcttcaaatgcgatttcgatgatttccggaacgtccggcgtgttttcaagagatgctgtcaggtcatatgccccttcaggcggcgccgcccacggatcttctaatataccgcattcgttggcacgtccccacaggttctggtcgatggaatacgggctgtcaagattgatcggaatcggtatgccgcggcttgcggcatattcaatttcttcttcacgcgaccattgccactcacggaccggagcaatgacctccagatcaggatttaatgatttaatggatacttcgaaacgcacctgatcgttgccttttcccgtgcagccgtgcgctacggccaccgcgttttccttttccgcgacttcaacgagttttttcgcgatcaacggacgggatagtgcagatacgagcggatacttgccttcatacattgtatgggcctgcatagaaatgagcgcgtactcccgggcgaattcttctttcgcatcaatcacataggaatttacggcgcctacttccagcgctttttgctgaacgaatgccaaatcctttccttcccctacgtctaagcagcaggcaacaacatcgtatccctgttcttgcagccattttatcgctacagaagtatcaagacctcctgagtatgccaatacaacctttttttgttctgccatgttaaaagctcccttttgtataaaaattagtttcagttaataaaaatgcattttgtatgtatacactgtaacaagtaaattctgttttttcaagccttttataaaaaaaaccccacccaattttttgagcggagcagagcctttttatacatttataaatcttttcggatttcccggagcacatggggcagttcaggaataatcagtttactcattgcaagctttacggcgcctgaggagccgggcgtgcagaagactgcggtattttggatcacacccgctgccgccctggacaaaatggcggcggaaccgatgtcctccgtatagctcagcatgcggaacagctcgccgaatcccgggagttcttttgaaaacagcggcgtgaccgcttcaattgtgacatccctttcggcaatgcccgtccctccgtttaacagcaccgcatctgtatattcatccatacagccggataaaacggctttctgcaattcatctttttcatctttaacaatgtcataagcgaccgtttcaaatcccgcttccctgaggaagtccatcatgacgcgcccgcttttgtcggtttctttcgttctcgtgtcgctgactgtgatcaccttgcagcgcacggctgacggggcttcttgtttatgttcatgcacactcattgcttcacctcatcgtttatgtattaaacatatcgtaacgtttgattctggggcattcaataaaaaagcacaccctaaaaggatgtgcttttttcgatcattactgtgcaaggcggacaacgtcgcgtgcgatcatgacctcttcgtcagtcggaatgatcatgactttgacaggagagtgagggtagctgataaaggcttcctcgccgcgcacgttgttcagcgcaggatcccaatatacacccatgaattctaagccgcgaagcacgcgttctctgacttcaacgctgttttcaccgatacccgcagtgaaaataatcgcgtcaacgccgctcattctcgcagcgtaagaaccgatgtatttatggattctgcttgcaaacacttcaagagccgtttccgctctttcgtttccttcttttgaagcttccacgatatcgcgtaggtcgctggagaaaccggatacgccaagcagtccgctctttttatttaacgtatttaatacttcatctgccgtctgatccgttttttccataatgtacggaatcaatgcagggtcgatgtttcctgaacgtgttcccatcgcaacacccgcaagcggtgtgaagcccattgacgtatcaatggattttccgccttctaccgccgcgatacttgcgccgttaccgaggtggcaggaaatcagacgcaaatcttcaagcgggcggccgagaagctcagctgcgcgctgtgtcacgtatttatgagatgtgccgtggaaaccatatttgcgaatgccgtatttctcgtagtattcgtacggtaggctgtacaggtaagattgttcaggcatcgtttggtggaacgccgtatcaaacactgcaaccgcaggcacattcggaagcacttctttaaaggctttaatgccgacgatgttagccgggttgtgaagcggcgctagttctgaaatctcttcaatctcacggattgtttcatccgtaagcaaaacagaatcgctgaatttttctccgccgtgaaccacacggtggccgattccgtcaatttcatttaaatcctttataataccgaattcagtcagcttgtgaagcagcatcttcaccgcaaccgcatgatccggaatatctgtcacttctgtatttttttcgccgttaacagagattgtgaaaacgctgtcggcgataccgatccgttctactaaaccttttgttagcaccttttctgaaggcatttcgaataactgaaattttaaagatgagcttcctgcgttaattgcaataattttagacataaatgacgctcctatcaaaattcttcttcgtttgttcgttcttttttcccagaccataattgcagtccaaaaaatatctgacttttccatttaaacattgtcaactcagcatttcaagtcaacatccacattggtaccgcttacaatatgaagtcgatattttctgataaatttcatttgtgccaaatggacggcacggtcttacgaaatgttattttctttccttaatttgtgttatcgtcctgatttccattcattttaaaaagcaaaaagcagcgcgggattttgcatctcacactgctttttcgccattatttttctttttgaatccattgatccaattttgccatcatctcccgcatcgcctgctggttcgcaaaagaaggaagattcgccaaaagcgcttgtttcggcggctttgcgtcttcgccttttttctgcaagattaaaatgctctttgcctgcgcttcgtctttaaacatagtagccggcagctgaagaagggcgttgatatacactttttccgcaaaaaaccgcttcagtttatcgctttgcgcgctgtcaaacagatggttcggaatcataaaaaataagtatccgcccggttttgtatgtttgacgctctgctcaataaataagtggtgagcaaaagagtggccttcatccgctttcagctcaaacgcttcagcgccttcgtcattcggatagtagccgaccggcaaatcgcagatgaccgcatcggccggctcgataaataacggctgaagactgtcctgacagaacagctccatttctttttcctgcagattcgcctgagcataagcgatcttcagaaggacatcgtcgatttcaatgccgaagctttttgccgctttgtcagaaagctggtttgccgcggtcagcagaagatttccggtgccgcaggcggggtccagcaatgtcaggccttttcggccgcccataaatttattcacgaggtaactgatgaaaatgccgatcgtatcaggcgtcatctgtctgttcggatgggacttatctttcagcccttttaaaatggcgagctggaacgccttgcggatccattcatgctcccattttctgaagtctgctttcgcaagcaggctgttaagctcgccggtttgcttttcctgaagcggaagctggtcggccttttcaagaaaatacatttctcccgcttccgcaagcccctcaatatatgaaatctgaaggccttctgctatcacttgggcggcttcatctaaaagttcataaatctgaccgacatggtcgtgttgcatgctgtttcctccttgccatgaaaagagctccgcggcagcacccggagctctttttctctctttacttgattaacgcttttgcagcttcgataggcttttcataattcgggtggtttgtcgcttcgcttacgtattccgcgtaaacgacttttccgtcctgatcaaggacaaatacggaacgtgccaaaagacgaagttctttgatgtgaacaccgaatgcttcaccaaatgacatctctttatgatccgataatgtttcaactttatcaattccgttcgctccgcaccagcgcgcttgtgcaaacggaaggtcggcgctgattgtataaacgttcacatcaccgagttttgcggcttcttcgttgaagcggcgtgtctgcgcgtcacatacgcctgtgtcaatggaaggaataacggatatgatcgttactttccctttcatatctgctaatgtcttctcttctaatccgtttgtcagaaccgtgaagtcaggagcttggtcacccggtttcacttcttgtccgatcagcgtcacggctccgcctttaaatgtaatttcagccattctgattcctccctttatctatgtatagctctatcatagtcgagttttatgcaaactgcaaaggttatgccgcatcgtaaaaaaagctaactgcgggcggcagttaacttttctgttataaatcgatatccgttcttttttggttccggcctttttcattctttttaaacatatgctggatgcgttcaatcgtttgaggcgcggagtctaacagtttatcaatcagatgggtgttttcgtctaaatgaagcatgcgcacgccgtttgttccgacaatcagaaacgcaatcggcgtaatggatactccgccgccgcttccgccgccgaacgggagcttctgctcttttctttcatcgtcctcggttcttttttcagccggctttcctccaaactcgcttccgcccgctgcaaatccgaatccgacctttgaaaccgttaagattacgctgccgtcaggcgtttcaacaggatcgccgatgattgtattcacgtcaatcatttcttttaaattttccatagcggttttcattaaaccttgaatgggatggtctgccatatgcgctcctccttaaactgatgaatcattctttgaagcaaccggaaccggctgtttctttcgtatgatagaaagtccgttccgcccgtatttgagcaatttgaaagctgcacctataagatgtccaaaacgaaaaaagaatatacactgcaaatgcgtcttggatgcaggcacttgaaaagacggaatgacttcgcacaccggtttatgtatgaaacgcagatgatcatacagcatcgccgtaagtcctccctttacggcccacaatccgccggcggcgattccagtaacggcggcgtcctttattccgataaccgtcacccattcgaacttcgtaacacggactcccgcaagaaatgaagcgacgatttggcgcatctgaaagacttggtgcagaatcatttctattctgtgaatgctctgtttgacatcttcatatgtgatttttttcttctcttttttctgacctttcatttctgattttgtgtcctgtttgacatcaattgacgcgtcttcgctgtttactttaatgacgggcagcgtttttttaatacggatcagcccgtataaggccgagatttcaaacgtcagtttgtcgttatctttatcgtgaagatattcgaaagtcaggtggattttcatcctcatgagcagccaggctaaaatgagaatgagaataacagctgctgcggcatatcccataagcttcacttccttagcagcattatcgccaaaaccaaaaaaaataaacccggacgtttattccgggtttactgcttttatttgcggtacagcgcttcgtgaatcaccgttgtgtcggcgatcagatcatgaatgccctgctttttgggcgtaaacgcaatgacgatatagagaatccagattttatcgatataacgccccaccgcttctctgaaaatgacggtgctccaagtcagcggctttccgggcgtcaaagaagtgacctttaacccgaagaccatcttgccgagtgtctgatgaaaccatttcgtcatgaacacaaaataggcgaggtagacgatcagggttgtgacggaataagctgagattgtaaacattccgcttgttgccgggagcttcatcagcgtgaaaatcggtgaaacgatgagatggttaagtccccagaccaccagccaatcaagaagaaacgcccaaaacctgatccaaaagcccgcatatgcctgctcgggcgccctctgttgttcggcttcctcttctttgccgtgaaagccttcgtaagtcgcgtccattctttcttcccccctactttgcatagagatacatcatccgcggcgaaccggattgcgaaatgagttctttcatattcagaaaatcaatttcgcttttaaacattttcgctgcgctcatggaaaagagcgagcctaatccgaatccttcctcgtatgtgatgactgaagcgtttttcatatttttatggtcctttttcatcgcgctgatcgtatcatcgtaaaaaccgagctcatcaacgaggccgatttttttcgcttgtctgccgtcgtaaacacggccgtcggcaatttttttcacatccgcttttgacatgtgccggccttttgaaatgacattgacaaatccttcataagaatcgttgaccattgtctgcatgatctttctttcttccttcgtcatatcgcgggtcggggacatgatgtctttatgcgcgccgcttttaatggtttcaaacttgatgccgagttcatcggcgagcttggaataattgacgctttccatgatgacgcccagtgaacccgtgagcgtttccggtgaagcatagattttatcggcggccgttgaaatataatagcctcccgatgccgccatggagcccatggatacataaatcggtttcttcgtttctttctttagttcttccagttttttatgtatttccgcgctttcgtacacgcctccgccaggggaattgattttcagcacaattcctttgacgcttttgtcttctttcgcacgctcaacctgttttaaaaatgatctgtgatcatacccgcctgagctgagcaggccagcggacccgccgttatcctcaatcgtgccgtccacttcaagcacggcgattttactgccggggctgcccttatccagcgtcacttcctctgtgtcatctgtcagtgaggcaaagtcagaccctgtatccccgatattcttcagcaccccgacggtcacacttgcaatgactgatacgccgaaaatgccgagcgcgatgacgagcgcaatccatctttttgcattcatttgttctcctccttttctgtcaatattcgtacgttcccccgtaaaaaaagattcatttttttcatgaagcgctttcccttaacggataaacaggaaacatgttacactattgccacaggtattttaacacaatacctgctgggagaaaaacgtaaatatgacagcaaaggggaatggggatatgaccgatcttcgccgcaatgtttatttttttcacaaacaaaacaacgaaacaaaagaacaagtcagctctttgaagcagcttgctgaatcgcacggttttacagttgcggctcaaccggaggatgccggaattatcgccagcatcggcagcgacggctcatttctgcaagccgtcagaaaaaccggattccgtgatgactgcctgtatgtcggcatcgctaaaaaagggaaagcccatttgtactgtgattttcacagcgatgagcctgaaaaaatggcggccagcatgaccgcggaacagcttgaggtcagaaaatacccgctcattcacgtaacggtggacggcagcaatcattttcactgtttaaacgaggtttccatccgttcaagcattattaaaacgtttgtgatggatgtgttaattgatgatcttcattttgagacgttcagaggagacgggatgatcatttccaccccgacgggcagcactgcctacaataaatctgtttcaggcgccgttgttgatcctttgatttcctgcatgcaggtatccgaactggcatcgttgaacaacaacacataccgtacactcggatctccgtttattttaagctcagaccggaagctgacactgcaggtggtgcaagacggcaatgagcatccgattatcgggcttgataatgaagcgctcagcacgcggaatgtcaaaaaggttgagattagactatccgataaaaaaatcaaaacggtgaaactgaaagacaattctttctgggaaaaagtaaagcgatcatttttatcataaaaaaagaggacgggcatcactgcctgtcctctttttcatatacgatacggccgccgacgacggttttgacagcttccaattcatgaagctttttcgggtccgtcctgaacggatcaccgctgagtacggtaaagtcggcatcatagccgggggcgatccgtccgcggctatgttctttatggataatggccgcgcttccctccgtgtaaagctgaatggcttcgtacacggtcagacactctttttcataataggccggaccttccgggtgctgcttgctcgtacggagcacagccgattgaatacccagaagcggatcggccggctcaatcggggcatctgaacctccggcgcacagcatcccttttgacagcagtgttttccaggcgaaagccgttttcatccgctcttctccgagcctgtcaatcacccacggaaaatcactggccacaaaatgcggctgaagatcaagtccgatcggcagccgggcggctctttcaatcaatccgtcatctaatacttgcgcatgaatgagcctgtctagctgtccgggctttgccgggtacctttcgataacatccagcaccttttcaaatgcaaggtcgccaatcgcgtgcacggcgatctccatccctttctctctcgctttataaacaagagcggcaaggatttcgtcatcatgcacctgaacgccggaaacagacggatcatcatgataaggctttttcaatagagcggttctgcctccgagcgcgccgtcagcaaaaattttcatcgctccgtattccaaataaggtccggtcgatttatccagagcgctccagctgtcgacggcttcgtgatgtacgagcagatggacgcgaaaaggataaaggccgctgccggttaatgactcgtacgcggcaacgggaacggacgcgtctccgtagtatgccagatcttctgaatgcccgccggtcaggccttttgaccagcagtccgtaatcgccgtttgaagcgcgcgtttgacatagtgaagtgagacgggcggcagggcctgtgtcacaagctcttgggctttatccagcaggaggcctgtcggaccggtgccgtcccggacgataatcccgccgtttggatcaggtgtttcgtttgtaattcccgccgcgcgcaatgcggccgaattaaccgccgcggcgtgccggcatacccgcttcagcaggacggggcggtcgggaaagagcgggtcaaggtcatgcttcgtgacgtaatccggccgttcaaacagattttcatcccagccttcgccgatcagccattcgccatcttccaattcacgctctgcttcttttgcggcccgcagtatcgcttcttttgacgtcagctgcgacaaatcgaggcgaagctgtttttccccgtgtccgattaaatgcatatgactgtccgtaaaccccgggaacatgacagccccatgtaaatcgatttcctccgtatcaggcgaaccgtatgttccttggagctcccggaagctgcccgtctgcctgacgacgccttcttcggtataaatggcttcagtgacatgattcttgtccagcattgtatagatggtgccgccgtgccaaatcgctttcatccccgctcaccctttatcctgtattatgcttttttatcagccttcagccgttcttcacgctgtctcagctccacacgtctgatttttgcggacgccgttttcggcaggctttcgacaaactcaatttctctcggatatttgtaaggcgccgtaatcgtttttacgtggttttgcagttctttgacaagttcatcactgcgcttttcatcgtcttgtaaaacgacataggcttttacgattgaacctctgatttcatccgggctcgccacgacggcacattctttcacttccggatgcttcacgagcgcgtcctctacttcaaaaggcccgattgtatatccggagctgacgatgatgtcatcattgcggctctcaaaccaaaagtagccgtcctcgtcttttttcgcgcggtctcctgtaagaaagtaatctccgcgaatctgctttttcgttctttcgggatctttataatattccttgaataaggccggtgtgctcagatgcacggcgatatcgcccgtttcgcctgtttcgcatatttcgcctttatcgtttataatctccacttgatttccaggggtcggtttgcccatgcttcccggcttaatatccatatccttcaggacgccgactaacagggtgctctccgtttggccgtatccgtctctcactttaatgccgaaatgcttccggaatacgtcaatgacttcccggtttaatggctcacccgcagaaactgcgctgtgaagggcagaaagatcatatttgtccaactcctccacttttgccatcaggcggtattccgtcggggtacagcagaagacatttacttgatggcgctccagcagctctaaatacgtcttggcgttgaatctgccgtgataaatgactcctgtcgcgccgcttcccagaacggcgagcagcgggctccacacccatttctgccagccgggcgccgcggtggcccacactgtatcgtcttcagaaatatccagccatgcaccggctgatgtttttaaatgggcaaaggcccagccgtgtgtatgtacaacgcctttaggctggccggtcgtgcctgaagtataggacaaaaacgccatgtcttctcttgttgtatcagctgtttgaaaactgtctccatccgcttcaatcgttaggaggtttttccagccggcatcattttcaccgattgacaatgtcaccagctgttcggtattcaccttgtcaaacgcgtttataaatgaaggataaacgatagcgcctttcacttcggcgtgtttgatccggtattcaaggtctttggcgcgcagcatttccgagcaaggaatgacgaccatccccgcttttaagatcgctaaataaacggcatacgcttcaagcactctcggaaccatgacaatcagcttatcgcctttttcaaatccgagacctttcagacgggctccgattttattcgtttcttccatcaatttttcatacgtccagactttcttgccgcctgtttgatcttcccaaataagcgcgttcttctctttggaacggctgaacttttcgatttcatttacaaggttatagttctttggggcgattaaatcttctcgttttaacacgaacaactcctcactttctttccccattatacataaacataggccattacaataaaaatatgcataaattgcttcccgccctctatctatactcatgaaaaaagagcggggaattccccgctctcttagccattatgtgaagttgtgattaaaactgctgctggctgcttccgcccatgctttgctgagcaaaagagacaagacgttttgtgatttctccaccgacagaaccgttggcgcgagaagttgtttccggtccaaggtttacaccgaattcagaagcgatttcatacttcatttggtcgatagcttgagcagcgcctggcactaaaagctggttgctgtttccgctgtttgattgttgtgacatgtgtatcacctccttgtgagtatagaatgtgataaaacacatgtcttcattcaaaaaaactttggtaattgtatacagttttaaaacaggccggcaaacttatcgtgagcttcctgctccgagtaaacagtgatggtttcgatgccggcagcggcctctgcaatcagcggttcaaaatcaacgaagctttcgaagtgctcgattttttcttttttcggacgtgttttcggacttggcggcgtaaagatggtgcagcagtcctcaaacggctgaatgctcgtttcataagtgccgatttcttttgatttttcgatgatttctgctttgtccattccgattaaagggcgcaaaatcggcgttgccgtcaccgcattgatcgcatacatgctttcaagcgtctggctcgctacctgcccgaggctttctcccgtaatgatcgcgagcgcttttcgttcttctctgattctatccgcgatttgcagcataagacgccgcgtcgccgtcatcgtatagttctccgggatttgtttttggatgagttcctgcgtctttgtaaacggcacgatatgaagtgtcatactgccgccgaacttcgcgaggcatcccgcgagatccatgactttctgctttgcccgttcactcgtatacggcggactgaagaaatgtacggcttcaactgataatccccgtttcatcgcgtaaaaaccggcgaccggactgtcaaaaccgccggaaagcatcagcatcgctttacccgcggaaccgacaggaaggcctccggcgcctttttcgttacgaatcgtcaggaatgtcgcttcctccctgatttcaatccgaagcggaatatcgggatgtttcacatcgacggttaatccatccgtgtttttcaaaatatggccgccgatttcagcgttcatcgcattcgtatctaattcaaactgtttgtaagcccgtttggtctcgaccttaaacgtattccccggtttatattcgccttctatcgcggctaaagccgtttttttaatgtcttccagcttgctttcgcatttaattgcgagactaaagctttgaatgccgaatatattctttaataaggaacaaatttcctccgggttttctccattaagagtaatcgacatccggtcccggtttgaaaagtattttacttttttataatcctttaataccaggcggatattctgttttaatctttcaataaaactgcgtctgttttttccttttgtggatatttcaccaaaacggattaaaatatgatcgtaattcatatgctacctcatcattttttttagtttttgaacagccggcaccagcgcggccataaacggctccgtgatgtcagctgtatggctgaagttcaggctgactcttatgctgcttgatgcaatctgttcgcctttattcatttgcagaagaacacggctcggtttgtgctctcttgccgaacatgccgcggttgtggagacatatattcctttttcctcaagcatgtgcagcagcacttccgccttcacgcccggaacggaaaaattaatgatatgcggcgcgctgttttcagcgggggtgttgatgacgaccccgtccgtcccgctcagcctttccatgagcgcattcttggcagccttcacggaagaaagccgctcattcatgtcacgcgcggaaagattgatcgctttcgcaagggaaacggcgcctgccgtgtgttccgttccggcgcggacgcctttttgctgcgagccgcccgtgataagcggaatgagccgcgttccttttttgacgataagcgctccggtcccttttaagccgtgaaacttatgccctgaaacggtgcaaaggtcaatgcccgcttcttctatagacagcggaactttatgaatgccctgcacatgatcaacatgaaacagaatattccggtgctgcttcaaaaacccgccgatttcctttacaggctgaatggagccgacttcgttattgacatgcatgacgctgacgattatcgtatccggcctgatagccgatttgacgtctttcaaagaaacgaagccgttttgatcggccggaagatatgtgacttcaaagccgaacagctctgtcagctgatcaagtgtctccgtcacagaaggatgctcaatcgccgaagcaatgatatgtcttcctttactcatgtttgcccaggctgctccctttaacgcagcgttattcgcttcagtcgcgcccgatgtaaatacaatatcataattttttaaacgcaaggttttttttatttgctgagcggccgcttcaaggagctgttccgtctcagttcctaactggtgcagagacgaaggattgccgaaataacggctgctcgtctgtttatacacttccaaaacctcttcatacggctcggtcgttgagctgttgtctaaatatatcattttttttactcctttaatgaaaacggtacatcgtatgatatttatgctaccataacaaaagtaaatataaattcgcaataaatcgagtattgacttctctgtacattgccatataataagtaatgttcgttttgttatattatctgacaattaattgacagaatatttcaacatagtatttaggaggatttttatgaaacactcactacctgtcaaagataccgttattatcggtttcatgcttttcgcactttttttcggggcaggaaatatgatatatccgccggagctcgggcaagcggcggggcataatgtctggaaagcgatgggcggtttcttactgaccggcgtaggtctgccgcttttgggtattatcgccatcgcattaacgggcaaagacgcgaaagggcttgccgataaagctcatccggtattcgggactattttcaccgttgtgctttatttatcaatcgggccgcttttcgcgattccgagaaccggaaccgtttcatatgaaatcggtgcagttccgtttttaagcggcattccggaaagattatctttatttgttttcacgttgatctttttttctattacgtattatttagctcttaacccgtccaaaatcgtggacagagtcggaaagattttgactcctattaaattcggtattattttaatcatcgtcgtaaaagccattgtcactccgatgggcgggctgggcgccgtacatcaagcatattccggaacgccggtgttcaaaggatttttggaaggctataaaacaatggatgcgctcgcctcaatcgtcttcggcgtcgttgtcgtcaacgctgttaaaagcaggggcgtcacccagcgtaaagcgctcgccgccgcttgtattaaagcgggtctgattgcagcggcaggtttgacattcatttatttatctttggcctatttgggagcgacaagcacggacgctgtggggccgctcggcgaaggcgcaaagattttatcagcttcatctgattacctgttcggttcactgggaaacatcgttctcggcgccgccatcaccgttgcgtgtttaacgacaagcatcgggcttgtcacatcttgcggcgaatatttttcaaaattgattcccgctttatcatacaaaatggtggttacgattgtcacgctcttcagcctggcgatttcaaatttcggacttgctgaaattattgcattttcagttcctattttatcagccatttacccgctggcgattgtcattatcgtcctttcctttattgataaaatgttcaaggaaagacgcgaagtctatatcgcctgcctgatcggaacggggctgttcagtatcctggacggtttgaaggcagccggcattccgctcggatcattagattcattcttaaacgcaaatcttccgctttacagcatgggaatcggctgggtgcttccgggcattgccggagcgatcatcggctgcatcatcacattttttaccagcccgcccatcgaattaaataaagcaaaatcgtaacattcagcgcctgcggtttgatgtatatcagccgcaggctttttatattccgtgagaaactaaaaaactgcacctctgatttccatcagggtgcagtttttgcttgtgcgtctatgaagcagattgatcagctttaatttttttcacggcgccgggagctgttttttcaacagcatctgccgccatctcataagcttcattatagctgtaagcgtaaaacagccgttccgcttctttcagctgttcggataaaatatgattctggcttcggaagcggttgccgtactggatgatccgctcaatcagcttcacctgaatcacaagatcttccgcctcttcgctgacttcctcaaccaccttttcggcttcggccagatgtttggcggcttcctccatgttcagcggcagctcttccaattggctgacggtttcttctatatgatgatttgccgtctcgagcttgtccttgacttgttcaggaattcccggcacgttgcttttttgcagcattcgggctgtgtcagaaatggttttccgaagatgcatcagcgtttcccgcgcctgcagttcttcttttctgagcgcctgcagattttcacggtattcggcatgttctttctgagcctcttccatctgcttttcgatggcctcgacttcttcaatcagcagcgagtaagcgacatgctcaccgtcaagcttttctctcgcctgctcaaggagccggccgatcgtttccagctgtttttcgaaagcatgctgtctgccgatttctcccgccgtcagctgatagctttccttgacgagctccgtttcggtttttgtgcggtctttttcttcctcgagcttctcatacgcgatgatcagctcaggcattttgcttaatacggactgtccggcttccacttcgccttccagctgttcatacatcgattgaatggtttcatcaatcagctgaagaatggcggacgcttcgtcgacatctaattcttccaaaagcgcgctttcggcccgtttcaattgattggtgagtgtctccagctctttttcgatttgaatatgctccaatttgtagcctttttccgtcatttcccggtagccgtctttcagcttggcaatttggttaggcacggtctgtttacagtcagcgagcagtttcggaacgtcatctatgtatgtctgaagctgatccagtctgcggtcctgttcaagcagcacttttctcgctttgatgtaattgccgctttccgtctcttcttcgaactcttttatgccgctccagatttcgtcgagatccgtctccaggctgttatatagctctccgtagagatggctgtacgccagaagattttttcgcgcttttgaataccactcacgcacctgttcaatctctccgcggcttttttcctcgctcgtcacaaggtcgctgatctcacgcagtatgccttctatatttgattcggctgcagtgaggaggtcgtcgatgtggacaagcacctgattcgcttttttgaaccggtatttgtcggcgttctcttcggcatcataaaggagctcttctactttcggcagatgggctgtgacaatttcatcccactcttcgcgccatctttcaaagaactcttccgtctctccggtcattttcagatgtttgatcttggacatttcttccactatcgaacggtttaaaatttcaatcttccatgactccagccggtcaatttccgtataaattttttttctgaaaaagtagcccgccgcaaagagcgcgagcagtataaccaataatccgatgactaactccataatgagcccccttgttgttctcttaatctgtcagggtgttttatgtattcagaaagatttcaatatatgtattgagaaaatctgtcgttttcattgttattatgataccatgtaaccaacattttttgaccagaaatcaaaaactttttgcataatttcggcaggattctgcaattttttaatggagtgacacaaatggaaaaacgagacgctcatatccacacccctttttgccctcacggctcgaaggatgcgctgaaacaatatgtcgaaaaggccctggaaagaggctttgactcgatcacatttacagagcacgccccccttcctccgtcatttcaagatcccgtaccgcttcaggacagcgcgatggatctcagacagatggaggtttatttggagcggctgtcacagctgaaaaaggaatacgatggacaaatcagcattctgactgggctagaaaccgattttatctcagggtatgaagaggaaaccgcggcgtttctgaacacgtacggcccctcactggatgacggcattttatccgttcattttttgaagaccggcccgtcttatatatgcctcgattttgacgagcacgcgtttcagcagcttgccgaccgcttcggaagcgttgaagccgtatatgaacaatactatgaaactgtgtattcttccattgtaacaccgctcggcccctttaagccaaaacgggtcggccatatcacgctcgtcaaaaaattcgcgcgccttttcccttacagcatgtcacctcaaataagagagcttgcggcccgctgtcttgacgccgtgaaagaacacggaatggagctggatgtgaatacatccgggctcagaaagaagtttgccggggaagtatacatggaggattggatggctgagacggcgaagcaaaaaaaaatcccgctcatattcgggtcggacgcccatcaagcggaagatgtcggcagttcctacgaaacgtacaaaagcatcattacttcataagcgccgcatcaggccgtcggaacacgctttcgatccagatcttcacctcttcaaaataccttttataaaagtacggttcatgaggctgcatatagagcacctccgtaatatattgaggctgaagatacggcatcatcaagagggatttcaattgcagaataaaatgcggcacgggcagcgtcagccgcctgtggcgtgactgcccttcttcaatcaccagctggaaaatatatttttctttcattaagtaagtagacataatttccctgataagcacggaatcaatcgtcacttcccggtacacaaaccgcgttaattgacggttatcgtgctgataggataaaatatcgaaaatcacccgcaggatgcgttcctgcgcgtcttcaccgttcatactgacggcggctttttccagcgcttcagtatagccttcgtaaaactcggaaactaaatgttccattaatccgcctttccctttaaaatagtaggagatgtgcgcaacatttacatcagctgactttgcgatttcacggacggacgtgccggaataacctttttggttaaacagctggacagcggcgttaataattttgtctttggtgcttactttcatacggctcacccctttatgtgtaacaattcaagcagaaaggcgccgttcctgtaagaacttctcgacaaatgccggcagaacggccggaactttgtttgatattatagaaaaagtgagggttttccatgtttcatgtcgaaaaacaatccggagataaagaaaaaagttatcagcttctgcttaaacagctcgaagccatgacagaagatgaaacggatgcgatcgcaaattacgcgaatgcgtcagcgcttttataccattcattacatgaagtcaactgggcggggttttacttcgctaaagagggcgagctcgtgctcggaccgtttcaaggacttcctgcctgtgtgcgcattccgttcggcagaggcgtatgcggcactgcctactctaatggcgacgtgcagcggattgccgatgtgaatgcgttcccgggacatatcgcctgtgacgcggcttcccagtcagaaatcgttctcccgatccgcgtaaacggtgaagtgatcggtgtgctggacattgacagccccgtgaaaaaccgttttgatgaaacggacgaaacctatttagcaaagtttgttgaaacgcttgaaaaacgattaggataaaaaaggagcccggccggcaggccggctccttttttatgtcgtcgtgctgttttgatggatgatcagccggtttttgccgtttcgtttggcgatataaagcgcctcatccgcttgctgaacgagcaatttcaacggcatcgggccggtctttgaccagcaggaaacgccgcaggaaatcgtcacgcgcggctcggtattttcccgaatggcgcgaaccagccttttagcgatgcgttctccggatgacacgttgatattcggcagatagacagccagctcctcgcccccccacctcgcagcgacatcatgctcacgaatatggttcttcataacggtggccacctgaatcaggatcgaatctcccgtttgatgaccgtatgtatcattaatatttttgaaattatcgatatcaacgaggatgaatacacctcgtttatgaattttcatgctgtattgaattttctcatccagataggttcttgaatacagctccgtcagctggtctgtctgaacaagatgctcaagcctgtcgcgcagcatggagttcgtgaccgccaatgtcgcatggtgaatgagcgcttgaaaaagcttatacatttcaaacgtaaaagcatacaaatcctttttcaataaaatcgcgaacccgaagacggtgtcattttcgatcatcggcaccgccatcagcgagccgaaaccgttttcgccgaatacagtctttccgctgccgataaacacgcccttttctccctcgaacagcttttctttcacaatgctgatataggggttcgcacgttctgtcttaaaaaaagcggtatgtcccggaagcagattttgcgtctcaaaatgatcaatatgaaaaaaagccacttcttccgcatgaaacgattgggtcataatggcggcgagctcccgcatcgtatcagtgagtctgaggcgctgattcagctggcgcgatgtttcattaatgagctccagattcgcaatgctttttttcgattgctcatagagctgcgcattttcaaatgcttttcccgctgcgcccgcaagcagcagcatttcactgagagtactgcacgaaagaacggcatcctgcagcccctccgtcttcagaaccccgtaagtcccctgctggcctttgatcggcagataagcagatgacctgccttttctgagcagtctccccgataaataaaccttcagggcagacggatcggcatcttttccgtccatatgtaattcttttgcgggaagctgtctgtccgtatcctgatcctgcgtgataaacagtgaaaaacggaaagaccggaaagccgtactcaaacttgcctgcagtttttccaaaacctcattttggtccaaaagcgaatggaacatttctgtcattctgtgaattttccgctgatgcttcgttttgtcaaacagcccgctttgtctcacagattgattgataaactgagtaacgatctcaggcaatgattccgggatcggcagcccgccttccgagcacagataaaaggatctgccggaggtctgattcctgatcataaaacggccgtcactctctttcagcggagcataatgcggttcatcttctgtttttatggtgaaacgtgttgattctgccggtgaaagggtcaatgaaagagatgtaaagcaggattctagagctgaggccagccataacagcgagtcggataatgagacggattcagatttcgttaagaaaaaagaaagcattttctgatgaaaggccgtcacttcatcaattgtttgttttttcatttttatcacctaaacatgtactactcatttttgtacattatatcataaaccggcactcttcatggagaaatggttgacggcggcggggaaaaatcatataatgttctttgtgtgaaatattgcagcctttttgttcagcttctgtgtttgcattttgttccttagctgtaaggtgtatcgtgtaactctctgctgctggagcgaggatacatgaaaacaaaatgtgcacggtcggatcgaacagacggtttttattttccacaaaataaaaccaaaggaggagtcacattatggctcgctatacaggtccatcttggaaactgtctcgccgtttaggaatctctcttagcggtacaggtaaagaattagaaaaacgcccttacgcaccaggcccccacggtccgggacagcgtaaaaaactatcagaatacggtttgcaattgcaagaaaagcaaaaacttcgtcacatgtacggtgtaaacgaacgtcaattccgcacattgtttgacaaagctgcaaaaatgactggtaaacacggcgaaaacttcatgattcttttagatgcacgtcttgataacgttgtgtacaagctcggtcttgcacgcactcgccgtcaagctcgccaattagttaaccacggtcacatccttgttgacggaagccgcgttgacattccgtcttaccaagtaaaacctggtcaaacaatcggtgttcgcgaaaaatcaagaaacctttctatcatcaaagaatctgtagaagtaaacaacttcgttcctgagtaccttactttcgacgctgaaaagcttgaaggtacattcactcgtcttccagagcgctctgagcttgctccggaaattaacgaagcgcttatcgttgagttctactcccgttaagtaaaacgctctttaaagagcattggattaaaccccggacatgttgtgatgacaatgtttccggggtttttcttttgggctgtcagaataatggacagatgctccctctctttattaaaaaaagccccggacaggggctttttttatgtgccaactggcttttcagctacatgtacattagaaaaacccatttgacaagcagaagcgattttttacataatgaatcatcataccttacaaaaaaggagcgactgaatgaacagcatcccctctatcgtcagcaaacacaaagcctattttgcggcggggcatacgagacagctagaatcgagactgaacatgctgaaaaagctgaaacaagccatcaaaacacaagaagccgatataacagccgctctctatcaggatctccacaaatccgaacaggagtcgtacacgacagaaatcggaattgtactggaggaaatcagttttgtgatgaagcggctgggaaaatggatcaaaccgaaacgagtcaaaacgcctctgactcacctaggctcgaaaagcataattatccctgagccatatggaaccgttttggtgattgcgccttggaactatcccttgcagctggcgctttctccgttgattggagccattgcggccggaaacacggtcgttctcaaaccgtcagaatatacgccggcggtttccgctgttctttccaaactcatcagcagcgtttttccgagtgactatgtcgctatggcggagggcgggcccgacgtcagcactgtgttattacagcatccctttgactatattttcttcacaggaagcgttgccgtgggaaaaatcgtcatggaggccgccgccaaacaattaattcccgttaccttggagctcggcggcaaaagtccctgcattgtccataaggatgctgatatacagcttgccgccaaacgcatcgtcttcgggaaatttacaaatgcagggcaaacctgcatcgcaccggattatttatttgtccaccaagatatcaaaacgaagctcacagaagaaatgaagcgtgcgatcagcgaattttacggccctcagcctgaacaaaatccgcagtacggcaaaatcgtcagtgaacgccactatcagcggctgctcagctttctgaatgatggcatcccgctcacaggcggacaatctgatcccgctcatcataaaattgcgccgaccattctcgaacaagtgagggatgactctccagtgatgcaggaggagattttcgggccgattcttccgctgtttacatacggcgatatcaatgaagtcatcgagaaagtccaatcacgcccaaagccgctcgctctgtatgtcttcaccacaaacaaagaaactgagcgcgctgttttagagaatctgtcgtttggcggaggctgtatcaatgatacgttaatgcatgttgcgacgccgtatttgccattcggcggcgtcggggaaagcggcatcgggagctatcacggatttgacagctttaacacgtttacgcacaaaaaaagcgtcgtcaaacaaacgaaccgcttcgacttcgctttccgttatccttcttccaaaaacgggctgcgaatgattcggaaaatacttaaataaaaaagcgcagagtatctgcgctttttataaatcctctatacaccaattaatcggttcgtctcctaaattaaacctatttttaaaagttcaaatcgaagtctaatagtaaaaatgaaccaacccaactgtaggaaaggttaatcctcatcaccctggtgagtcctataataattttcagcagtatagatattccactcccaaaaatctgctccttgagacatgatatacctatctaaaaatatctcaaaattaagtttcatgggttcatattcaataaatccgcggaaccataaatagtttggatctgtggacattttggttttgttaattaacaaataacatccgtctaacagatgcgcgacgggaataaactgaggctctaaaaaaccattttgcatatacttttcaatctcttctaaattaagaatatgcaatcccccacccacattctcaccgtaaatcaacaaatcaaatattctggctccgttatgcaattttaaaaaggttttataatcttcaggaagtgagacttttattttcttctcaaaactctcaatctccagatctgttgcacctttagagaaagtacattctgtctctaaaagagttccttcattccctaaaatttttaagcggcctttttcatcaattaattcttttagaccttggagcgttttttcaacaaaaactgccattgagccacctcttacttattaatatttatcccaccaaggatttaatagattttggtgcatatcacgagggagaggatacaaattattaaagttattttttcccccatactttagcggaagcacatggtgaatatcgaatcaactccaattccactttggatcaactttgtctttttaggataatacgactttgaatatgatttacctgctttaatatccttccctaaaaattctctattatggagaaaaacccttccatattttccgctataagtgttactttcatataaatcgtttctggcttcgataactatcggcttttcgccaactatgcttgctattttaattgtggttgtgtggattttttgttggggtcatatattgttgtgtaggacatcgtaactaagctagctgctttagtgtgcgcttttcttcttttttctcaacgtctggcacattaacaatgttgttttcttctttggctaaggggttcttataggttatttcattgtggctatcctgtttggcaagttgtcgtgcctccttaatgatggaagcctggccatcattattgctcttagccactccattcttatctactgttaaagtttctttttcttcaaaggttactggttttgctaatccaaacgggtgctcttgtgttgctttcgtttgcggcgaaaatccaatagcaatcaatagagttgcgacaagtaaacagattgagttttttaacaacctcatacaaatcctccttcatttgttttctggtctatcatgctatattttcacttttatttaaacaatttgaaaattaaccctgctccctttaataggagttcctttttgagaagtcctaaagtaactgtttagtagagattcgcgctttgcttttgttttaaccctaaatgccgtcaagagtcatggattgcatatgccgtttgtgagccatatacgccgttaataagttctttacctttttatctaggcaatgatggagatctgctgacaagcctaaatccgaactgaattcctgtagttgcgctgccatgtcttttttatggataataacagggttgagatttggcaccctttcagccgcacacctcccattctttcctaattcctctaaggcttgactaattattttatgtaatccctccaatcatattctttctaaactgcccccgtactcagtcgttaaccgccaatcgtttatcccgagatttaccggacgcagtttacagagaacataaaacttttttcattactcgagagacgaatactgccataactttctgggaatatttgatttgtaagagaatactgctgctgtaccacccatagcctcctactgtgttgactcgcttaacagttggaggcttttgtccttaaatttaaagcaccctcccctgcgggaaagcgcctgcctgtttattaactattaccataataccttatataaaaaattagatgagtttgcttatattttaaatttcttcatccttctaaagctgtatattaagctctataagcttttttaagtcattcgcatttcttgtttaatatggagatttaaaccacttatctaatttaattttttgagaacaatagaagcgtttacgtttgtttgcgttccccctgctaaagtttgaagagtaactgctgctgcagaagtatgatttacaagagtaagaatgtcacctgctgctagagtaattatggcctgaccattgttctgttgagtaccagctcctgaaccgtaaactgtgttcgtcaccggccctccatttacaaataaagtgaattggttaggctctacacccgagactgaaaaagtgacctcgtaatctcctggagtggttactataatttgagctgttccaggggcatgtgtaatgccagcagtagtgattccagttgagtcaaaaattaccggagcctctatagctaccgtttctgcacttagattgtacacataagcatattctgatagcccagatcctgtggctccggtggctccggttggaccgatatctccggtggctccggtcactccagtgactcccgccgctccagttaccccggtcgctccagtggctccggctggtccggctggtccggctgctccggtggctccggtggctccggttggaccgatatctccggtggctccggtcactccagtgactcccgtcgctccagttaccccggtcgctccggtggctccggttgctccggttgctccggctgctcccgtggctccggctggtccggttggaccgatatctcctgtggctccggtcactcctgtgactcccgccgctccagttaccccggtcgctccggttgctcccgtggctccggctggtccggttggaccgatatctccggtggctccggtcactcctgtgactcccgccgctccagttaccccggtcgctcccgtggctcctgtgactccggctggaccgatagctcctgtggccccggtcgctccagtgactcccgtagctcctgtggctccggctggtccggctgctcccgtggctcccgtggctcctgtgactccggttggaccgatatctcctgtggccccggtcactcctgtggctcccgccgctccagttaccccggtcgctcccgtggctccggctgctcccgtggctcctgtgactccggttggaccgatatctccggtcgctcctgtgactccggttggaccgatagctcctgtggccccggtcaatcctgtggctccggctggtccggttggaccgatagctcctgtggccccggtcactccagtgactcccgccgctccagttaccccggtcgctccggtggctcccgccgctccagttaccccggtcgctcctgtgactcccgctgctccagttaccccggttgctccggtggctccggctggaccgatagctcctgtggccccggtcgctccggctggtccggctggtcccgtggctccgactggtccggctggtcctgtaacccctggaatccctcgcacccctcgtaatcctcgttgtcctacaataacttttgtataacagatgggacagcacttacagcagtttggtttcggtagtttttgtttacatttagggcatcttctatgctgatcataacccatcagctgctcatctcccttaatgattaatatatcattataatatgtttaatttataaataagtgagcactagtttgatcctcattaagtttgtcagctgatcttatattatttatcaatttctgtttataaataactcttcacattattgtaatccctatttgaatcgatggggacgcagaaatattttgccttccagtctacactgcggattttatctgtttcaacaataaaaattacatatttggcaaaaaatcttctctttgatgcgtctgaccgtttcgcgggaaacgccagaatgcagagcgatttcacgatatttcaccccgtctactacaaagacagtccggtgtttctcgtcaactatttcttcagtagctcaatcaagaaaatcaacaatagattcacatttccagagccatttttctcggcggtccacttggcgtaattctgcctgacgttcgccctctgatcccctcggcatccccgcttcatctcaaatcgattctcagataaaagagcatccccaaaccttttgtttaatatcagtaagcatagatacaacccctccctgtaccgattcctcaaaaaagttactcactctattattcccctccctatactgctatcacaaaacccgaatatataaatcccattgtatcctgaaactttcatttctatcagttgttatttttaattttaaaataccgattcctctttttgcttttgccgctcgtacactagcaaataagcgttcatcctgtctttaaacttcttttacaagtaaaaggtcagcgtctcttccggattatgcaaccgtaccgtttttttctcacacaccaaaaatccgagcagcaggataagtgagcaataaactcgcgggccatgtgtttttaacatgcggcacttatttcattcgataattaagcgagttgagacaaaaagtggttttcctctacagagtgattcctcagcaacccttccttgcaagagaataaaaaaagcacccagtccggatgcttcatacattaaaatcatcgtccttccttcttcaatcacaccatactcagctgcggttcaaataattcatagtgaatggattccggcggtgtattgaattcagaaatcagctttttcatttctttaatgaatgacggtgatccgcacaggtaaaaatcagcatctttatctgtcatcacttcttctaacagctgtttgtcaatccggccttcccgaaaacgaatgttttctgaacggtcttgttcggacggctcgctgtaaataaagagggtgtcaacggatgagtgttccgcggcttcttcagcttcatgccgcaacgcatgatactctccgctccttgccgcatggataaagagaacgtttcgctgcggctgggttttggcaaccgtctttaacatgctgatcatcggggtaattccgacaccggcactgatgagaaccagattctttttggaatcagggtctaatacgaaatccccggccggagcgctgatctcaattgaatccttttcgtgtaattggtcatgcagatatgaagaaacaattccgtcttttttcacggaaatcctgtaataatccttaccggatacatccgacaaactgtactggcggatatgcgtataacccgtgtccggaatgtatacttttacactgatatactgtcccgctttgaactcggggagaacttgtccgtcttccggttttaaataaaacgacgttatctccttgctttcttttacctttttatcaattttaaacgccttatagtctttccagccgcctttttgcgtttccgcttgttcatacatgtccttctcaattccgataaaagcgtctgcaatgacgccgtatgctttttcccatgcctgaatgacctcaggagcagccccgtcttttagcacatcctttatcgcgattaacaagtactttccaacgattgggtaatgctcgggtttaacaccgatactccggtgtttatggctgatttgtttgacgacgggaacgatgttttccagccggtcaatattggctgcggctgcaatcacagcattcgacaaggccgtacgctgtgtttttttcttttgattcgtctgattaaagatattcagcagctcagggtgatgctgaaaaagcaggtcataaaatcggcctgtgatttcttcaccatgctcttctaagaccggcactgtgcttttaatgatttcaatcgttgtttcatcgagcattctaaaaatccccctaaagatgtatgcatctcgattgacctgagaaaagaatcgtttttgaattcttttttatagatttccccgttcaaaaagggttagccattccaatttgagacggattcaggaaaaaccagaaaaacgaaattgcggctggaaaattgtggacttgccatggtgtacttgtccgatgcaaaaccctccttgtcagcatttaataaagtacgggaggtgagatgaatgggtaaaaaatcgaaagtgtattactgtgaccctaagtatattgtgactgacaagtatactgacaaagaagtggtttacgtccatcccatcaaacacattaacagagagcatatccgttatgttccccgccacgtttataaggaagaaacaattcacgaagtcattgatccgggcgatccggggaaatgcgggtgtaaaaagcagaaaaaaagacgcaaaaagtaattggttcgatttcttgccttatctcaggttaaacacgtaagtttcagcagacctccgtaccttttggctcctctttttcagaggggtctttttcataagcaaatacgttgtgaggcgggaatctgcctgatattcttgtcatatacaaattcacaggaggcatgatgtatgagcaaaaaaatcgcagttctgatgacagatcaatttgaggatattgaatacacaagcccggcggaagcatttaaagaagcgggccacagtgtggtgacaatagatttggaagctgggaaagaagtgacgggcaagcacggtgagaaagtaaagatcgatcaagcgatctcagacgcagacgccaaggaattcgatgcgttattgattcccggaggcttttcaccggatcttctgcgcggagatgaccgcccgggtgaattcactaaagcattcgtggaaaatcagaaacccgttttcgcgatctgccacggcccgcagctgctgattgataccgaccttcttaaaggaaaagatatcacgggattccgcagcatccgcaaagacttaatcaatgccggcgcacattataaagatgaagaagtcgtcgtgagccataacatcgtaacgagcagaacacctgacgatttggaagcctttaatcgtgaatcattgaacctgctgaaataagagaaaaaagcacagacccgttcagtctgtgctttttttatggacttttcaccggctctcaaaaaacaccatcagttagactattctccggcccatccaccataagtaaaataaaaagagaatgttttaaaacccgacaggaggttcgctatgtggatgatcattttgctgcttatcattttagtcggttttaccggtaatatcgtctcgcttttgagagcgcaaaaacacgcatctcaaagaataattgagcttttagaaaagcaaagccgaaaataatctgttagcgctgtgttacccataatagtaataataattccggcagatttcctgaaatatgatttgatgccctttctcgttcggatgaagaccttctgacatgcacatgctgcggaaagcgggattatacgggtcgatgagatcagtatcaaacagatcggcatatggtacagagaggagtgtgcaggcttctttttggactttcacatagtcagccagcttcaggcccagtttatttttatcagtatcacggcggacgatttttccttttgacattttggcttgtctcgttggggtcaccacaatgatgctcgcgcctttatttccgctccgcagctgctggatcacttggcagaagcctccgtaaaatgtggtgatatccttttcatctgtgccgatgggaatgtggttgcaccaatcatcatcagttccctggacaatgatgacatcatgtccctttgttttaagcgcctgctgataaatgttatcgcttccgttgttgctcatattaacgccgctgacagacagattggttatttcagcgtttgtccggtctttcagaatgtcaccaaagccgtattccgcacgcagcccccgggcgacgctgtcacctaagatcgcgatttttgaagccttccgcagcctgcttatgctgatgaagtcaacgctgatatgcccgctgtccgtgatatgcaaaagcttgctgcttatgtttggcaaagagactgtctttccttcagagttataaaaatcctcattcagcttcattcggcgtcatcccttcctttttatcctccggcatcttttttgacataaaaaacggacacgaacaaacagcgccatgttgtcagttcagtgtccgcagatgatgatactggattttttatgcagttctcttgccattatagcagatctccgttacttgtaatagagtctgctgtcagcatttaaaacagcgtttgcgggtacgtttttgatgagaccgtctgctgcgggaacggtgtgtccggcgatgcgtccgtcttctgctgcgggaacggtgtgtccggtgatgcgtccgtcttctgctgcgggaacggtgtgtccggtgatgcgtccgtcttctgctgcgggaacggtgtgtccggtgatgcgtccgtcttctgctgcgagaacggtgtgtccgttttctgctgcgggaacggcgcgaacattttttagaaaccggttcttggtataaatactcccctaaaccttctctttccgcaacggcaactccatgttcaatttctttaacagaaatagcgttcaattctgttcacctccctttttctttacaacataacgtatgaaatgaacccctcacgtgtataagcttatctctcatatgagcgagaaatagtcatttatacaacaaaaagacccgtgggaacgggccttttgcaggcattttgccgggaacaaacgcaaacttaagatcgatttatttcttcctctcgctctccggctcggggtgaatcattacctgtgcttgtttgaattcattcgtaatatctctttcaatgcggtcacacaggtcatgcacgtctttaatcgtcacgtgagaggctacgaccaggtgaaaatcaatatactcctgcgggccggagcgtcttgtacgaaaatcgtgaatttcaataaattcctgttgaaatgtttcaataatctttaaaattgttttttcttcctcttccgacaaacgggtatcaatcagcggcgggaatgcttctttcattaacttaaacgcttcatatatgatatacaccgccagcaccatacctataatgggatcaagtatgtaccactccgttacggtaacgaccaaaaggcttgccgctacgcctaatgatgtgtacacgtcagtcagtaaatgcagggcatttgatttcattgccacggaattaaccttttcggcttctctttttacgaacttcgaaacgatcaaattaatgagagcccccgcaagcatcacaacaattcccaatacaggcagatgaaccggcgcggggttgaccagtttttgaacgcattcatatatcatccaaatccctgccgcaaaaatcagaatcgtctcgatagtccccgacagattctcgacttttccatgaccgtacggatgccctgtatcagccggcttttttgaaatcctgacggagataaaggcgatgaaggcggcgatcaaatctaaaaaagaatgaatggcttcagaaagtatcgcgacagatccggttatgatccccaccactattttgagcatgacgaccagggaattgcttataaccgataaaaaagcgattttagaggtgttttccaccgtgatcctcctctttttaacttcttgaatttatcgtatcaaacggcattcgtgtgggtctacggcaacgtttttcacaaaagccatacatgtaactcaccataaactaagttggaaagcgacaaaacaggcgcatctttctttcagcactcaagtcccattgacaagatataaccgcttacattatagtagtttcatgaataaccactacggaggatgtttatggaggatgttctgaaagaattacagaaatttggattttctcaatatgaatgtaaagcatatatcggcttgttgaaacactcgcctgttaccggatatgaaatcagcaaaaggtcaggcgttccccgctcaatgatctatgaagtattggggaaattagttgataaaggcgctgtccatattgtgccgtctgatccggttacatatgctccgcttgccggaaaggaattaatcgaccggctccggcacgatttcgagagctcattcggctaccttgaggaaaagttattggcgctggaaagcgagcaggagatgaatgtcatccgccgcatcagcacgaatgatcatgtcatcaatgagatgaaggatatgattgaaaaagccgaggaagagttgtggctgtctgtctgggaacagcagattccctttattcaagaagccgctaacaaacgcgccgccgaacaattgcccgtcttttcgattgtgttcggccctccggaagtgaagctcggaaatacgacaaatcataatatgtctcctgaagtggcggagaaacggatgggcggaagattaacgatagctgcccgcgataataaagaagtcttaatcgccaatttttctccgcagacgaatgcctgggccattaaatcagaagatcccgctctcgttctcgtggccatggaatatatgaggcacgatctgatgttcgcggagcttgtgaaagaagtcggggctgagaaagttgaaggcctgatgaaacaaaaccattcgttatttcatgtcgtcaccggaaatcggttcatataaatgtgaaccgtattttctttgattttttcattagtcgttatcattataatctctatgaaaggagtataaaaaatgattaacacagaagtgcaaaaaaccgccgtttcccgggaaatgaacgatacgtttttacagggggtgcgggattgtgtgcctacgctgctgggctatatgagcatcggttttgctttcggcatcgttggcgttgcctctcatctaagcattcttgaaatttgtttgttatctttgtgtgtctatgccggcgccgcccaatttattatttgctcgctccttgtttccgggagtccgatttccgccattattttaacgacgtttatcgtcaatctgcggcaccttctgctgagcctgaccatcgcgccgtatttcacgaaatactctttggcgaaaaatatcggcttcggggctttgcttactgacgaatctttcggagtagcggtgaacaaagcggctcagaacggcaggttatacgataagtggatgaacggcctcaatataaccgcttacatgtgctgggttatttcctgcgtgatgggcgggcttctcggacaatggatatctgatccttacgcgctcggcctggactttgctttgcccgctatgtttgcggcgctgcttgtgctgcaattgcaatcgtccgcttcggaaaagctgaagcacagcctctccttaattctctatatgatcatttttatggtcttgttatcgtatttcgtcccgtcacacatcgcggtcatcgtctcaaccgtgattgtggcaacgatcggggtggtgacggacaaatgagcatcagcacacaaatgatctggattatactcggctgcatgattgttacacttgtgccgcgcattgttccgtttatatttgtccggaacattcagatgcctgagttggctttaaaatggctctcctttattccgctttgcattttgacggctctggtaacggaaagcatgattgtgaaaacaaacagcgctttgacctttgattggaaagcaatgatcgttctcatcccgacattgctttgcgcgatgcggacaaaaagcttatccatcacggtcatcacaggagtcgtgctgatggccgccgtcaggctgatatggtgacaatcaaaagcctccattccgcagaatggaggctttacctttatgatgtcggattttcttcttccgtctctgattcctcggctttggcttcggcgtttatgctttgctgctgttcccaatgatcccgctgcaatctttcttttgcgatggtaaacatgaaattcacggcgcagcaccccttccctgttttgcttatactatgtactgtactcatttccccgtgcagtattcacaaaacataaaaaagcagcctgccgcattgagcggccggactgctttttattttcagtacgtgatcaggaagtattttttctttccgcggcgcagtacggtaaattgatcttcaatgcggtcttccgcagtcagaagatgcccgatgtccgtctggcgctcgccgttaatgtaaacagctccgttttgaatgtcttcgcgggcctgccgttttgaaggcgacaatttagattccacaagcacgtctactaaagacagttcttcagagcagtctttttcaaacgaaggtacatctttaaatcctaccttaacgtcttgagcggaaagctctttaatattgccgctgaacagcgcctgggagatatgaacggcctgctcaagcgcttcgcggccgtgtacaagaacagtcacctcttcagcgagacgtttctgcgcttctcttttctcaggagtcgtctccgttttttcagcataagcttcaatttcctcttttgataagaaagtaaagtattttaagtatttgacgacgtcgcggtcatctgtattgatccagaactggtagaattcgtacggcgatgttttttctttatcaagccaaatggcgccgccttccgttttgccgaatttcgtgccgtcagcttttgtgacgagcggaatggtaagaccgaaagctttcgccccatcttcttctgattttctgatcagttcaagaccggccgtgatgttgccccactggtcactgcctccgatttggagtttgcagttcttttctctgtacagattcagaaaatcgtaggattgcaggatcatgtagctgaattccgtgtaagaaattccggtttcaattcttgagcttacagtatctttcgcaagcatgtagttaattccgaagttctttccgacgtcgcggagaaattcaatgatgctcagctttccgatccagtcaaagttgttcgctatgacagcggggttttctccggcctcgaaatctaaaaatcgggaaagctgatttttaattttttgcgaccattcgacaacgatatcctgagtatttaacgtacgttccgcttttttgccgctcggatcgccaatcagtcccgtcgcgccgcctacaagcgcaatcggatgatggcctgcaagctggaaacggcgcagtgtcaatatcggcagaaggtgtccgatgtgcaggctgtcagccgtcgggtcaaaccctgagtataaacggattttttcttcgttcagctgtttattcagtccttcttcatccgtcatttgctggattaagccgcggaatgataaatcctctaataagttagtcattttgtctgctcctttgtttatgaaaataaaaaacgccccttcgtttaaaacgaagggacgatataatcgcggtaccaccctactaataaaagcataaaaaagcttttatcactctttttgataacggaccgtgtccgttctttcactactgaaagccttggaatggctttgttcgcaaaagcggttcatgagtgtattcggcatatcttatgtgctgattttcaccggccatcagctctcttgaacaatcagataccctacttgtctcaatcaaaaccttttcgtatgaagcttactcatttttaacataaataagatacgatgtcaacgccggctttaatcttccattgtggacaggtcgcctgccggcaggttcagctcccacgccttcagcacacgtctcatgatttttccgctccgtgttttcggaagtttatctttgaattcaatttcccgcggtgcggcatgcgcggcaagcccctgttttacaaagaggcgaatgtcctccttcagctgatcggatggctcatgcccttctctgagcgcgataaacgctttaatgatttctccccggacagggtccggctttccaatgacgccggcttcggcaatcgccggatgttcaacaagtttgctttcgacttcaaacgggccgacgcgctcgccggatgtcatgatgacatcatcgactctgccttggaaccagaaataaccatcttcatccatataagcagaatctccggaaacgtaccagccgcccggcatgaaataagaatcatatttctctttgttgttccaaatggaatccatcatcgacggccagccctttttaatggcgagatttcccattcggtacggcgaaagctcatttccctgattgtcaacgatcgccgcttccactcccggaatcggtttccccattgaacccggcttgatctccatgcaaggataattgcagatgagctgtccgcccgtttctgtcatccaccacgtgtcgtggatgcgcttgccgaatactttatgtccccacttgatgacctcggggttcaaaggttctccgacactcaggacgtgacgaagtgaagtaaggtcaaatctggatgccatttcatctccggcgcccataagcattctgaaagccgtcggagcgctgtaccagacgctgacaccgagcttctcaatcgtgccgtaccagttttccggactgaatctgccgccgacgatcacattcgccgctccgttcagccacggcgcaaatatcccgtacaccgtcccggtcacccagcccgggtccgcagtgcaccagtaaatatcgtcttctttaagatcaagcacccacttgccggtctggtattgctgaatcatggcttcatgaacgtggagcacgcctttaggcgttccggtagatcctgatgtgtagtgaagcaggtagccgtctcttctgtccatccattcaatatcaagtctcgtgctttctccctcagccgctttatcataatgaatgattttatctcccgcttctttgctgccgccgacaatgaaaatatgctcgaggtcgggcaggctgtccgccggaatccgttcggccagttcaggtgtcgtcacgacaacctttgcctggctgttcaacaggcggtctttgacggcgccttccataaacgcttcaaataaaggaccggcgatcgcaccgattttaattgcgccgagcatgataaagtaaagctccggcgaacgcggcatgaaaataaaaacgcggtcccctttttccacgtttccataccgtctcagtacatttcccgcccggttcgattcctccatcatttctttaaatgtgtatttttcatcccggtttgcgtccttgtaatatagcgctactttgttttttcgaaatgattcggcatgacggtcaatcgcttcgtacgccgcattcagcttccccgtctgatgccaggaaaacgcagcttcgacctctttccaatcgaagctgcggtacgtttcctcataatttcgcagatgataattccccttttccgccggcaacgctttcaaattcatgcaacatccccctttgcttatctatagactaattatagtagatgttcacagttttctcaatttttaaaatataaattacaacactattgaaaacgctttatattttgttatgcttaaaagagatgtgtttttattaagaaccgacaggcggtgaatcagtgaaacatcataaaacgtaccattcttcatcaattcagacagcagccggtcctcttttagtagaagggcccgttcctccagaggacctagcacagtatgagtttcatgaaggcctgacagcctttcgccttcctcatgaacagcacaaagcgttaatcgagatcgccgggcttcctgaaggtcggatcattattgccagggacggacagacgattatcggctatgtgacgtatttatatcctgatccgcttgaacggtggtctgacggaaatatggaagacctccttgaactcggggcgatcgaggtcgctcccggctacaggggctgttctgtcggaaaaactttgctgacagtcagcatgatggatgaacagatggaacggtacatcatcatgacgacggaatattactggcattgggatttaaaaggaatgaaaaaagatgtgtgggaatacagaaagatcatggaaaagatgatgaatgccgggggtcttgtctggttcgcaacggatgaaccggaaatcagctctcatccggccaattgtctgatggcccgcatcggcaggcacgtcagtcaggagtcaattgaacagttcgacaggcttcgtttttatcagcgatttatgtattgactgacatacaaaggggataaaaagatgattgcagaacaaatcatgaaacgggacgtcatcaccgtctcaaaacacgactccattgaaacagccgtccgtaaaatgaagatatatcatatccgccatctccctgtcatcgacgacgagctgcacgtcatcggtattgtcacagatagagacattaaacaggccggccccggcagctttgaacaaaaggaacgcggcgcatttctgacaaacaaagtggagaccactatgaagcggaatgtcatctgcgctcatccgcttgactttgtggaagaaatatccgcttccttttatgagcacggcatcggctgtctgccgattacggtaaaccataagctgacgggcattttaacgaaaaccgacgtgctccggactttcgtcagcctgacaggcgcggcccagccgggatcacaggtggaaatcctggtgacggatatgacaaaaagccttgctgatctcagctgcatgtgccgtgatcttcagctgcaaatcctgagtgtgctcgtctatcctcatgattccgccgggtcgaacattctcgtcttccgggtgaagacgatgaatccgctcccttttatccgtgccgttcaagaagccggatacaatgtcttatggccgaaacatttgagggatcagccatgagagacagcgtttttgtttactcgccttcttatcagacgtatcaatttcatcaggaacatccgttcaatcagcgtcgtgtgcttttaacatacgatctgcttcaggcggcggatgcgtttgacgaaggagatatcgtcacaccgcgcacggccgctaaagaagagctggctctcgttcatacggaggattatatacaggcggtggaactagcgggtgcgggccggctccctgccgcagaaggagaaagctacggtctcggaacggaagacacccccgtttttgccggcatgcatgaagccgcgtcacttctggtgggcggcaccttaacggcggctgattatgtcatgacgggacaagccaggcacgcctgcaatttaggaggcggccttcaccacggcttccgcggcagggcctcaggcttttgtatctataatgacagcgccgtggccatccaatacatccagaagaactacggggcaaaagtgttatacattgatacagacgcccatcacggcgacggcgttcaatttacgttttacgacaggtctgatgtctgcactgtttcttttcacgagactgggcgttatttatttcccgggacgggacaggtactggaaaaaggaagcgggcaaggctacggctattcttttaacattccgctggacgctttcacagaggatgattcctttcttcacgcttacaatacggccgcctcagaaatcgcggcttttttcaagccggatgtgattcttacccaaaacggtgcggacgcccattattacgacccattgacacacctgtccaatacaatctccatttatcaggagatcccgcggcttgctcattcattagcccatcaatattgcagcggcagatggatcgcggtcggcggcggcggatacgatatttggagagtcgtcccgagagcatggagccgcatttggcttgagatgaaagggattgatcccggggaacgcataccgcagaaatggattgataaatggcagaagcactccccctgcacgttgcccgctttttggagtgatcctgaacaattatatcctccgattccccgcaaagaagaaatttcagaaaaaaatgcccaaaccgtggaaaaagcactttttgccatccggtctgagcagcggtataaaacaaaataaaaaacgaccttatgaggaggtcgtttttttgatcacaatttctacacggcggttttctttcatatgtccgggacttttgttgtccttcacaggtttcgtatccgcatacccggcagagataaaccgtttggcggaaaagtcttcattcgcggtaaaataccggatcacactcgccgctcttgcagacgacagctcccaatttgacggaaattgataggtggaaatccggcggctgtccgtatggccttctacctgtatgtcattcggaattgtttttaaaagcaccgcgatctgatgcagaaccggctcggcgtttttcagcacatccgcttttcctgtctgaaacagaacggcctcctgcagcaccagaaccactccgcgctcatcgcgcttcgccgtcaatttcgaactcaaatgatgcgcttttatgtatgtcttcacgttttgcaggagcaaatcctgttctttatgttcatttgctttgtctgatgacgccggttcacccccgctgccttttgtatgaatcgatgaaacggcagattgaaatttttccgcgtctatttgcgacatcgaaaaaagcaatataaagaacacgagaatgagcgtgatcaagtcagcgaacgtcaccatccatctcggtgaaccgccggaatgttccgctttgtttcttctttcaaaacgctcttttctaagcttcatggacagcgccctttttcttgttcgcaggctgtcctttacgccagtcttctcttgagctgaagacaacgagctgactttcgaggttgcggggatttttgcccgattggatgccgacaaccccttcgatcatgacctgtttgatgaaaatttcactttccgttttttcttcaagctttgccgcgattgggataaataccaagttggcaagcagcgctccgtacagcgtcgtcaatagcgcaacggccatgttcggtccgagggtatgcgggtcatttaagtttttgagcatgagaacgagtccgacgagcgtcccgatcattccccaggcgggtgcgaaatcaccggctttttcaaaaacgcgtcttccttttctgtgtctttcttccattgcggcgatctcagaatccatcaccagccggatcgtttcctcgtcccagccgtcaatcgcaagcaaaaggcctttttttaaaaacggatccttgatctcacgcgcctggtcatccagagacagaagcccctgcctgcgcgcctgctccgaaaggctgacaaatactctgacaagctctttcacattgtcatcctgacgggagaatacctgtttcagaacagaaggggttttctttaaatccctcggcggaaagctgataaagatcgccgcagcaaggccgcctgtgacgattaaaaaagaagtcagatctaaaaatgaactgattcccgccagtcccgtccctgacagaataccgattgcgacaataatacagcctaacataaagccaacgggcgtcagataatcaaaacgtttcatatcttctccttactcaagtaaaaaagcaagattccacccctcagagtgaagcttgcttttccgtttttttatgacttggttgattgtcttaattcgatgcggtgaggcaattcgacgatctgctcttcaaccggctctttgttcatcagttttgtcaaaagtctcatcgccacggcgccgatatcgtacgtaggctgcacgactgttgaaagctgagggcggaccatcaggctcaatctcgtattgtcaaaaccgataatatcaagatcatcaggtatcgaaagaccttgatcttgggccgcatggataatgccgagggccatttcatccgtcgcagaaagaatcgccgtcggtttccggtcaaggcccatcaagctttgaagcgcctccataccggaatcataggtgtaatcgccttccgctacgaattgctcgttaaacggaatcgccgcttcttcaagcgcccgtttgtacccttgcagttttttcgaacggttgatcggctcttgcatcggtccggagacgaatgcaatatcgcgatgccctttatcaatgaaaagcttaacggcatcataaatcgcctgttcgtaatcaatggcgacagaaggcgtctcgccctgttcttccactgatgccgccaagacgatcggcacaggagagcgcttaaattcttcgacatgctcgtccgtaatgttgccgcccataaatacgataccgtccacttgtttgccaagcatcgtatttaacagatgcagttctttctcaagattttggtccgagttgcttaaaataatattatatttgtacatcatcgcgatatcttcaattccacgcgcaagttcagagtagaaaatgcttgagatatcagggatgatgacgccgaccgtagtcgtttttttgcttgcaagccctcttgccaccgcattcgggcgatagccgagccggtcaatggcttccaatactttttttctggtcgtcggttttacattcgggttgccgttcacgacgcgggaaacagtcgccatactgacatttgcttctctggccacatcgtatatcgtaatgttgctcactgaaaccactccttttactggatacacttatccttatctatagcataaacactttatgtaaagaaatgtcgtacgatttcgcattctgtcgtttatgattgtaagcgtaagtcagtagtgtacattatttttcattattcatcaaatttaaatatctctcatgaaattatacacgtttttcccagtgatgaaaacgttcactttcattttataattaaataaaatgaagatacgaaaaaaagccgcgcgaggcggcctttaaagagcgaaacgttgtattatgcttttactttcagcattggctttaattcgttcagccatttctcgaattcaggtatatccatctgctgcgcagagtctgaaagggcaacggaaggatcagggtgaacttcggccatcacgccgtcagcgccgatcgcaagcgccgcttttgctgtcggaagcaggagatcgcggcggcctgttgagtgtgtgacgtcaacaaacaccggcaagtgagtttcctgtttcaaaatcggcacggcagaaatgtcgagtgtgtttctcgttgccgtttcgtacgttctgataccgcgctcacaaagaatgatttggtcgtttccttgtgacatgatgtattcagctgcattgatgaactctgaaattgttgcggcaagaccgcgttttaacaataccggctttttaacggaaccggcggctttcagcaattcaaagttttgcatgttccgcgcgccgatctgaatgacgtcaatgtaatcaatcgcttgctcaatgtgggcgggcgttacgatttcactgatcaccgcgaggtcatattcatcagcgacgcgtttaagaatttgcaggccttctacgccgagaccttggaaatcatacggacttgtgcggggtttaaacgcgcccccgcgcaggattttaatgccttgttttttcgctgcggccgctacttcggcaacctgctcatagctttctacggcacaaggtccgacgatgaatctctgatcgccgtcaccgattttttcacctttaatgtcaacgatcgtatcttctgcttttttcttccgggagacgagcaacgctttgctgtgatcctcttcttgaagttcaagtccggctttgaaaatttctttgaaaatatgctggatcgttgagttttcaaatgggccgtcattgctttcaataatgcggttaagcattgtacgctctctgacagggtcaaatcggttgacaccctgtgcttcctttgctttaccgatttcttttacaacggctccgcgttcattgattaatttaaggatttctaagtttagtgcgtctgcctgctgtcttaggctctctaattccttgttgctcatctttttcatcccttctatgctatgttttattttaatggttaacatgcatcttactacagttatgcgaaaataggaatatgaaataataaattttttcacattcggctttatcaccaaaacgcttttaagcttttatgcgttgaagtggtatatattgatatcctacatgatccggctgaaatgatcaatagtttttttcaaaaaaaaaccgccggtatcaaccggcggccagcaattatgaaaggtgctgctctattgcgttttttgtgatttgtgaatgagacgcgtgccatttcacttcgccgtttgcaatgacgaatacttgcgggctttcatgtttcacgccgtatgtctcggcgatatagtttgaaagcggccggctgtcctgcacctgcaggtaataagaaggcacttccgaatgcgccgatgcaaaggcgtcaaactcctgaaacgcggcttggctgatcgggcaggttgtgctgtgtttcaaaaacacgagcgtgttttctttctcagcggcatttttgaactcttcctcagacgatatcagctgttttgtcatgtcggttatctctccttattgaagatcagcgatttgcctgaccggctttttccccggcgtcttccgcttcggccttgatgctttgggccgtgtcctgcatttcgcttctcgtctcttcggctttctcggttagtgtgctcttagaacggtcttttaaatccttgactttattcataatctggcctgactgatcagctaccagctgggtgatattagatgttttgtctttggcgatgctgacatattgagagcctttttctttcgcgtcggccgtcattctgtccgtcttatcctttaacgcagaagcctgactgccgagatcgtcgcgcagctccttacctgatttaggcgccagaaacaacgccgttgtcgcgccgataattcccccgatcagcgttccgattaaaaaatccttactattgattccatctttgctcattatgattcctccttagtggatttttcttatgattaaagcgatgtttttttcttttgcttccacttgtcccatatttccatagcggcctggctccaggtgacaacctgactgatcttatcctgattctctcttacagaggccgtaacggaacctgctgcctgctttatggatgtattaaactgctggacggaagttcccacttcctggacagcatggacaaccgtatttaatttctctgatttttcctgaatgtcttccgcgagacggtttgtcttatgtaacagctcggttgtctctgcggtaatgcctttcatctgcccttcaaggccgtctaaagtcgaggcaacgtttgttaaagtcatctgcacggactttaatgttttggacagatagatgacgaggatgagaaatgcaacggcaatgagtgcgacgcttaagtaaagaatgatgatcatctaatacctccttaatgcaggatatagtggtatatacccaattcttaaaatgataaacatatatgaaagatctgtatgtatactatttctccgtttctcggtaaatccctttgcagcacgcgcaaaaaagcagtgagagccccactgctttttcgttacgctatgacgttttcataggctctcatatatttttgaatgtctccggcgcccatgaagatcagcactgcgccttcatgcgcttttaacacggatgtgtcattttcttcaatgagttctgcgttagcgattttttcctgaagatccgtgatcgtgagcttgccgacgttctcgcgggcagagccgaaaatgtcgcacagatacacgcgatcggccgcgcttaaactttctgcgaattcatccaggaatgattgcgtccgtgtaaacgtatgcggctgaaataccgcgatgatttcacgttcgggatatttttgacgcgccgcctcaatcgtgactttgatttcagtcggatggtgggcgtagtcgtcgatcagtacctggctgccgatcactttttcattgaatctgcgtttgacgccgccgaatgattcaagtccgcgcttaatcatgttcacgtctatctcttcatagtggcagagcgcaataaccgctaaggaattgaggacattgtgatgcccgtatgccgggatgtagaacgtatcgtaaaacgtattgcggacaaagacgtcaaatgtcgtgccttccgtatttttcacgatgtttctcgcttgaaaatcattttcttctcccgtgccgtaataaacgacaggcacattggcgtgaattttcggcaggtactcgtcatcaccgcaggcaatgatgcctttgttgacttgaagcgccatgttttggaaagcatcaaacacatcgtcaatgttggcgaaataatcagggtggtcaaaatcaatattcgtcataatcgcataatcaggctgatagcttagaaaatgacggcggtactcgcaggcttcaaatacaaagtattcgctgctttcatttcctctgcccgttccgtccccgataagaaacgaagtcggcttcgcctgctgcatcacgtgtgccaagaggcccgttgtggacgtcttgccgtgtgcgcccgttaccgcgacacttgtgtattttttcatatattcagctaaaaatttatgatatctgatgacaggaatcccttcagcgagcgcctttgcgatttccggatgagaatcagggaatgcgtttccggcgattaccgttaagccgggtttgatgttatcggcgctgaacggatagatcgggatatttcttttttcaagggcagcctgagtgaaaatctgcttctcgatatccgatccctgcacctgataccctgtatcatgcaggatttgagcaagcgggctcatacctgtcccttttattccaacaaaatgataaacagtcataatcgtacctccaacaaacgtctatctgttccccagtatatgacgctcatttcattttgcgaccgccgcgggcgaaaagcccgcacagcggcgcttccatttatttttacgttatcgtcagtatctgtaactttctttttgattaaacctgccgcatgatatttcagcgcgtgacagtgatgcagttttgatggtccatccactatcataccatgtttgtgagaaaaatgaacgatattcttattcttgagcaatgtcagcggccgtaatcagcacttcacggggtttgctgcccttcgcttctgagatcatgccttcggcttccatcatgtcaatcagcctcgcggcgcggttataaccgattctgaaccttctttgaaggcttgaggtgctggcactgttttgctccacgacgaattggcacgcctcaggaaacagttcgtcttcttccttaagggcggttccctgcctgatcagttcttcctgttcaaacaaataagaaggcggcagctgctttctgacatgagagacgacgcggtcaatttctctgtcggatacaaagttgccctgcaggcgcaccggttttccggtaccgttttcccagtacagcatgtcgccttttccgagcagcttttccgctcccgccatgtcgatgatcgttctggaatctacctggcttgagacggagaatgcaatcctcgtcggtatgtttgccttgatcattccggtaatgacatcgacagacggacgctgtgtcgcgacaagcagatgaatgccgcaggctctcgctttctgcgcgattctggcaatgctttcttccacatcgttcggcgcgaccatcattaaatcggcaagctcatcaatgaccactacgaggtacggaagcttttcgcctgtcttatgatcggcggttaattcattaaagcggccgatatctctcacacccgaatgggcaaacagttcatatcgccgttccatctcttccacaacccattttaacgcggcggtcgcagctttggcgtccgtgatgacggggctgaccaaatgcggaatttggttataaggcgcaagctcgaccattttcggatcaatcagaagcattttgacatcactcggatccgccttataaagcagactgaccaaaatggtattgatgcagacgctttttcccgatcctgtcgcacccgctatcaacccgtgcggcatctttttcaaatcaatgacgaccgggtttccggaaatatcgacaccgagcacggctgtaagcggagacggattcgtcctgaaagcggcgcttctgatcatctgccttaaatcgacgactttgcttacgcggttcggaacttcaatgccgatcgtgtttttaccggggatcggcgcctcaatccgaatatccttggcagacaggctcagtttaatatcatctgctaagtttgtaattttgtttactttcactccgggctcaggatgcacttcaaaacgtgtgacggacgggccttgtgtgacatgaacgacttgggcgcgcacattaaagtttttcagcgtaacgtttaaaagctcgcgctgttcttcaatccacgattggtcgtcatgtctttgcgccggcggtacgtccagaagcgacagattcggaaagacatagctcgctccgccctctggcgtcttcgcctgcttgtgtttatcgcttttaagcatcatgacgttaaacggaacattgcgctctttcggccgctccgcttttttcacagtctgaggctgtccttgatgctccgttttttcttcggcaggccgggacggggcatcggccgtctcgatgcttgcaggttcaggctcggggtctgaatgccgcgtgacttcattgtactcaggctgcgagtctgtttcctgttccgcgtcggtttcagctgattcgggcttgtcttcagactgcggctgaacctcctcatcgtatccgggttctgtgtatgtatacaccgtttcttctgcggtttcaaaaggcggtgctttttccggctcaggctcctgatattcctcctgcggcgccgcttgttcctctgtgttttcagccgttcgggattcttcatactcaggctctttaataggctgcgggcgggtttgttcatgctcttgttcttctgtaaagccggcagactccgcgctttccgtgtgctcccgctcttcagtctgctgcggttctgctgctgcaaacacttgctcttttgcattctcagcctcggtgtgaagctcctcttttttaacggccgggatttcttccgtttcttgtttcgcaaacggttctggccggtcattcgtctgttttgttatgccggatgttgtgaagacgggctctttttctgtttcctggccggcttttggcggaacaaattgctcctctgaaagcaatgttacgttctcttcacgccgcttttcggaattaggcgctttttttatgctgtgctgagattgaaagccgtaaaccggtgaaggaatggatgacggtttaaagggctttttcaccgtttcaggctctttatgtgtatgctgtttccgctcggtttgctccttcccggcggcataatcccgggacggctggcggcgttcgtgcctttcccgctgtctttggttttgctccgttcgcttatagccgtccggaacgacggggaagcggaaattccctttcggatattcgtaatatattttaggatcttccatgcgcgtgaatttgccttctggctgatccggtatctgctgtttcgggatttgggcatgcgtgtttggttcacgttcatgctcttcttctttttcacctaaaaataagtcaaaaaatttattcagccaactcatgtttaatcactctctaactccctttttagtagtctgggacgatatttagtataccattgccgggcggctcagaaaagattaagctcccaactgaagaaagccgttaagcaggcctgcttaacggctttctctcacatcattcgattctgtgcgcttatttatgggagttagaattgaaatgcttcgccggcctcgcggctgtcttcaagaacaagaatccctttttccgccggcgcatccggcaaagcgagttctttcgcggagcagatcatgccgcttgacggaacgcctcttaattcagcgtctttaatcacaagtccgctcggcatcaccgcgccgactttagcgacgacgactttttgccctttgtccacgttcggcgcgccgcaaacgatttggagggtttcctctcccacattcacttggcagatattcagtttatccgcattcggatgtttttctttcgattcaacgtgaccgacaacaaatttcggagaaaggtcaaccgtcagcgtttctgaaacgccgtttctgttcagtatttcattcacatcctgaacgaatgtctcagacaaagcgacggggccgttgtcctcaatctgtagataagaagacacattaaaaatgttaaaacccgtcgtttcttttgtttctttgttaaagattctgatgacatcgccttctctttcataggcgatttcttcgcgtgccgcatctttaagagagatcagaagcgtatctcccacaccttctttattgtaaaaagcgttcataagaaaaatcctttctaatcctttttcggccggcttttcgccatgataaacacaggttccagtctgccttcattatacagaaatgaaagggccgtaatcggcaccgtgccgcttgcaaagaagctcatggacatttgccctaaaatatcataacccgattcatttcgaatgtcagcaagtattaatacatcctgatgcgggacggaaatcgccaattcgccttcagcggcctgcttgtattcatgaagaatcgaatcattgagaatccggctggcgtcatagccgtcattcgccctgaaaaaataaaaataattgtccgcaaccgtatcctgtttcacaactgaaggaagagagcgaagattgaatgacgccgtctccctgatccgttcttttgtccagttttctttctcgagcatacggctgtcaattaagcggtacgtcttgccgaggtcaagcgcgtagtagattctcgtttcggccgtatggtcatcatacacgaggggaatgccgtcgctcgtttgatcgggaaatgatgtggagcggatgaccggatagataccggcttcctttccggacatctcctgtccgctgccttccatcgcctccattgcttctgacacatagtagacgatttcgtcgatcgcttcttcttttttcgtctcccacttcgcaatgatcggcgggagctccaatgtgatgccttttttggtcgtttgatcctcaacacggagggtgtctttttctctgtcaaaaaagaaggatcggttctcgtgctgcaggcgctgttttaataaatccgccagcttccttgacgtcattttcaaagcccgtggcctcctttatgctttagcaagggaatcggttaaaaattgctcaatttcttcttttgttttacggtctttgctgacgaagcggttcacttcttttcctccgttaaacacaacaaagctcggaatgccgtaaatttcccattccgcgcatgtatcaataaattgatcgcggtctacgtagtaataagtgaattcaggaaagtccgcttccagctcagggagaaacggctccacaaagcggcagtccgggcaccaatccgctgaaaacataaataccgcccaatcgtcttgtaccgctttttgcaattcttccgtgctttcaatctttttcattgtcattcctccatctgaattatgagttttttatatgctgatgtttgtccaattggatcataccagactgtttacagcaagaccaactatatgcaatatcattatcatatttcatttgcattatcaagcaagtttcgtttaccattttgcttgtagccgtacgaaaatctgaatatgtacataaggaggggcaaaagatgcattttgtcgtgtatttagcgggtgaaatccacagtaattggcgggatgagattaagcaaaaagcaacggcgctggacctgccgattacgtttgtcggcccgatggaaaaccatgaacgctcagacaatatcggagaagagattatgggcgtgcagcccgattctgttttaaaagacgccagagcttctgatatcaacaatttccgtacagaggtgctgatggaaaaagccgattttgtgatcgccctgtttggcgagaaatataagcagtggaataccgcgatggatgcttcttatgccatcgcaaaaggaaagccgctcattctcatccgcccgaaagaacttcatcatccgctgaaagagctttccggaaaagcgaatatcacggtcgaaaccgtcaatcaagcgatgaaagcactctcttatttatttgaaacagaataagcaggccgcctttatgcggtcctgcttacctatttacaatagaatgatatcaagtcttacttttcagactcttttctcaaatccaaaagaatttgtccgcaatcaattactcccacacccacttcattcataaatgattttactcaacctcaaactaactatatattgttttctttatatgtaaggaaggagagcgaaatccgcgcaataacggatacatatgctgctcgttgaaattgattaaaaccaaaaagtgggatactgcccgttatttcgcaagttattaataataactgctgccgcaacaataattacagaccccacaaaaaccggaaaagctaaatagctccaggcatacgccccttgaatcactacaatagggtccgctccagcaggtggatgagtagtctttgtaaccgccataaaaaatatagctagccccactcctaaagccaatgtccagggatgagaaccaaaaagattatatataacaagtccagtcaatgtcgagatgaagtgtccgccaataatatttctaggttgtgataaaggggcattccacgctccgaaagccagtacacaacttgccccaaaaggcgccatcagccacagagatccagttttataggttatcagtgacaagattaaaattgttataaaaccacctaataagcctgttgaagcatctttaacatttacttttaaaggactttttcctcctcctttcatttttttgaaataataaccttttttactttgtgcattttctgctgtttgctcaatcttcaatataacccctccttttcactaagtttaaatcaacttaactaacctgtaaatgacattttatgaggttataatttaaagattacaatccatccctcttcatggatcattcttctcttcaaaagggatcctttaagaacgcttgcggtaacatttttttgtttgaaattttaaacgttcatttggttttagctgcgaatgagttgttttatgaaaccatatttttgttttcgttatgaattgttttcaaaaaagacaaacagccttacccaaagaaatattgagataaggctgttcattaatttttatttatacatgatgattcaacattaaaataaagtgcaagatttattccgaccacaatgtaatagaggaaattcgttttatgttttcttaagatgacgggaaaccttttctctgttgccgcatatcttcattgaacaccattttctccttccggtgttatcaaggaataataagacgcattcttcattagcacatcgcttcattaacttgatcttttttgtatatataagcgataaaccttcataagcgatgagcgatataattgcatcatcaattttcccaatcggaatacgagcaagtttaccatcgataattttatatgtaaatggagccgattcaatctttttttctaaaaaagtaataaaagattctccaggttcttcaccatctgcaattttctcaaaattttctcttagtgttgatcgtaactcaagtattttttcaaccatcacagtagtcagttcatcttgtgctttttttaaagttaattgattgaaaaaaggggttcctttccccattaaccttaaccattccaaaagatcctcttttgactttaacaaattatgacgtttaccgtaactcaccacctcagtattaaccagatcaagaggaagattgttagagatgagaggaaattttatgtttgtcttttttgtcataaacatacctccttgcagaacaaataaaaaatgcaaatgtcactcgactttgtgaaatcactgctcatctcaatgctcggattggaacaattttggtaataatattgggaagcaatatgtgttacctacttctattttcaatacgctttacttttatattcacaacaaagaactgtctcgatcatgcggcttaaaacagaatgtaaaaacagcagtcaataagtattcaaagggacttattgactgcttattttttcacacattttctctgatcgtttcgaccgtctgtttgtcactcgccatgaccagcttaatgagcatttctttcgccgcggcataatcatcgacatggatgatggcggcatttgtatgaatgtatcttgaacaaatgccgatgacggcagacggaaccccgctgtttgatatgtggacccgtccggcatccgttcccccgcctgaagcgaaatattgataagggatattgtgcgtttccgccatatcaaggacgaactctctcatcccgcggtgcatgaccgtcgttctgtcgaaaatgcggagcagcaccccctcgccgagacggccgaacagctccttatcgccgctcatatcatttgccgggctggcatcaagcgcgaaaaagagatcaggctgaatcatgttggccgctgtctgcgcccctctcaagccgacttcctcctgaacggtggccccggcgtacagattgttcggcaggtcttttccgtgcagctcttttaatagttcaatgcttaacccgcagccgtagcggttatcccacgctttggacaatattttcttctcgttggccatcggggtgaacgggcagacaggcacgacctgctgtcccggtctgatccccattttgaccgcgtcctctctgtcatcggcaccgatatcaatcatcatatttttgatctccatcggctttgcgcgctgggcatccgttaaaatgtggggcgggatgcttgagatgacgccgataatcggtccgttatccgtctgcacctcgacgcgctgggcaagcagcacctggctccaccagccgccgagcgtctgaaatctcagcatgccgttatccgtaatctgcgttaccataaacccgacttcgtccatatggccggctaccataacggtcggcgcatcttcagcgccgcgccttactccgaaaacacttccgagtctgtcctgcacgatgtcatccgcatatttcgcaagctcccgtttcataaaggagcggacctgatgttcgtttcccggtgcgccgggaagctgcgtcagcgtccggaaaagcgttttcgtttcctcattcatattttcccctcatttctatgtaatgcttttattttattagaaaaacaaccgttttccaagcgctcagattgaatgggctggaaaaccgccgctttacttaacaccgtctggcatcttctgtataataaaaattacgacataattggaggtgcttcatattgaaattacgtcattttctcttaggtgcaggagtcggattatgcgctgccatcgcagtgaaaaagtatgcgatgaaaccttatatctcttcagaaaaagcgctccgtatcgtgaaagcggcttttaaacagcgcgggccgatagacggatcatggatttacacagagcccgagccctaccaggtaaacggagaaaccatccaggtatacaagaccggcgtgacacgttcggcattcggcgaactggagcaatatgaagttatggtcaatgcaaaaacaggccagattgtcgatgtcattgattctgtcgcctcataattcggacaagcaaaaaataaagcccaaaaccatcagcgttttgggctttattcggttacatcggccgaattcgtttatatacggggtgccacatcgcgtcctgcaccgcttggatcagatcctcgggttccgtttccgctacaccgtcctgaatcgcagctttagctacagctaccgccacagttgccgataccgtcctaagatcctccactttcggaagcatcggcgcccccggcatgccgacatccaccataccggcgatggcattcgcgcaggcaacgaacatattgtccgtaatgatccttgctttcgtcacaatcgtgccgagtccgagtcccgggaagacgagcgcgttattcgcctgtccgatatggtaggtaacgccgttatacgcaacaggcggaaacggactacccgtagtgacaagcgcgcggccttccgtccatttaatcaaatcttcaggttttgcttctgataatgtcgtcgggtttgacatcggcaaaatagcgggccgtttgacatgcgaggccatttctttgacgatttcttccgtaaatgcgcctgatacggtggatgtgccgatcagaatcgtcggcttggcctgacgcaccgtctccgccagatcaattgatccgccttcaccgctgcggccgtactctttcacttcatcagcagggcgcgcgtacggaacctgaaaatcacgcaagtccttcatatcatccgttaacaatccgtttctgtcgatacaccaaaaatggctgtaggattcttcttcgcttaatccgtcatgcaccatggcttcgcgcagctgctcagcaattccgataccggccgttcccgcgccgaagacgacgactttatgctcttttaaaggcacttttgatgcttttgcacacgctaaaacagctgcaagcgataccgcgcccgttccttgaatgtcatcgttaaacgtacagactttatctttataccgttttaatatgccgcgggcgttagccgtaccgaaatcctcccaatgaagcagcgcattcgggaatgtttcccgggcaagcgagacatactcatcaataaagcggtcatatttctcgccgcgcactcttgaatgctggtttccgacatacagcgggtcatttaagaggctttcctgatttgtccccgcgtccaatacgaccgcaagcactcgtgacggatcaattccggccgccgccgtatacaccgcgagttttccgacagaaatggcgatgccgccgacgccccagtcaccgattcccagaatgccctccgcatctgtggcaacgattaagtcaatgttttcattttttccgaactgctgaaatgcggcgcgcattccctcaggatcatctattgacaaatacagaccgcggggttttctgtactcatggctgtaacgctggatcgcggtgccgacggtcggcgtatatacgatcggcagcatttcgcctaaatgatcatttaacagtttgtaaaataacgtttcattccggtcatggagagcggtcaagtacacatttttgctcagctcatcaggctgcgaactgaattgttcgtaggcccgcctcgcctgctcttcgattgtcaatactttcggcggcagaaacccctcgagcccgagttcctttctttcctcctgtgtaaaggccacccctttatttaaaaaaggcgtagaaagcacttctaatccgcgcagtgttgttttgatttctccatctttcgtcacttgaaattgattcacctgtctcttcctttcaaagcaatttgtcttaggtttgcttttattcccgaaattcatacaggcaaatcatcgatccgcttattttttctcccgtttgacagatgcagccacttcgccgtcttctccccattttaccgctctgtaaatcgcgtcgtgatagaaaatcagccaggcgtctttttctgccgcgaacgtctgccatttctgcttttgcggaattgaggtcatcggataatcatcataggccagcacccataacggatttttatgcgcattcgtcggcatcaggtcagcaaaatgcacagccgcctccccaccgtcttctaagacgatgacgctgtggccgtcgctgtggccgccggtgtggtgcatcgtaatgccttctgtcagctgatactcgttctcaaaggtttcgacctgatcttgtaccgcctcccaattttctctccaatatgtattttttgatctgatattaggatttctcatttcgcgccactctgttgcagaagtgataatgcgggcattcgggaaaacagagacaagctcctctccgctgtactccgtcaggccgcatgcatggtcaaaatgaagatgggtcatcgcggcaatatgaatgtcctcacaagaaagcccgaggtcacgaagagattgtttcagattggattcctgtgttacgccgtaattccttttttgtttatcagagaatttccctcggccgatacccgtgtcaaccaatatattcaggccgttttttctgatcagaatcgggtctgttcttaattcaatctggtttttgtcatttacggggtattttctcgaccataaaggtttcggaacaacgccgaacatcgctccgccgtccatatgcgtcacaccgccgtccagccatgttaatgaaatattcccaatattcaatgtctccatcttgatccctcctgatgtaatggtagcaaatggcggcataaaaaaacagactcccgcatcagagtctgtcttttgttctccattcaacttcggcccgataaatcggctggccgagcgcggagaatttttcttcgtattctgtcataatattgcccttcggatcgctgttgtgcagatcaaggctgacttccgtcagaagcaggccgtattcggaaaagcttttcagagagtattcgaataaaccgcggttatcggttttaaaatgaatctcacctgtttcgcccatcacttcttcgtattttttcaagaacgttttaaatgttaaacggcgcttttcgtggcggtttttcggccacgggtcagaaaagtttaaatatacgcgcttgatttctccccgttcaaatacgtcattcagtgtttccgcgtctatatttaacaaacggacattgtgagccccgctgtccttaactttttggacggcagtgacgatgacgcttttaaacagctcaatcccgatatagttgatatccggattctgcttggccattcctgaaatgaactgcccttttccggtaccgacttcaatatggatcgggttgtcattgccaaagaccgtgttccaccgccctttatactgggccggatcactgatggcgatgtcagcgttttctgccagaaaatcattcgcccaaggtttatggcgcattctcatatgattgacacctctatctataatttcgagtaacaacataccatgaaacataaagagccgcaagcgccttttaaaggcgccggctgcataaaaaaagaggctccccggtccggaacactcatgtgatgcataaaaccgcaccgctttgcacaatgtatgacacagaaaggatgtgtatatgaatcatgggcttaacaagcgaacatcaggtccggttattaaaggacatactggccgaccatcaattggattgctgcggcacggttgccgagtatgaacagctggagcgcgtcatcaaatcactgatggccaacaccgggcttgattcaaatataaaaaacgtgctcgaggatgtctaccgctacagccagtccggcatcacggccgattccatcgacacgcatattcaggagcaccaaaaccatttgtcccaatgggtggagcagatggattcgtactcctgactacttgacaatccgcttcatcagggcatgaagctcttccatggcatcatgatacgctttgtcgtttccttttgatttgtgccaggcgatgaaggtgatggtctccgataacatgtaccacgccatccgcagccgaagcccttccgtgagcttcatgccgtacatcccaagccagctgtcccacgctggctcttcgacgtaatgatacaataaagggccgagatccatggccggatcagctatcatggcgccgtcccaatctattaaatacagctggttgtcttcagacagaagccagttattatgattcacatcacaatggcaaacgactttttcaccgaattgcacctgatccacatgagcttccaaataagcaaggccttcctgaataagcggcgaaaattgccgcacggcaaagacggcctgcttcagctgcgacaaaagggcgcccggatcaagcggttcttttcccaatcttttcagcatgtcgagcaaagcttttgatgtgtggattttgcggagcagctcagccaccgggcgtccgctcatatcctttgccttcagctccctgcccgccatccaatgctgagccgtaatgacgtctccgttttccatccgtttcgtccaaaccagcttcggaacaatgccttcggcggataacacggctaaaaagggcgagctattacgttttaaaaaaagctgttggccgttatgtttcgcataatatgcatctcctgtagctcctccggcggggaagatctcccaatcgctacctagtaattgtcccaaccagttcatatcaatgttcaacccatcatttcttaaaatattttagaataggcctccagcctttctctattggcggagcggcctgtcataaacaatttcatgagaataaaaaagacagctattgagagtctcatatgctaatcaatagccgtcctataaattttagcgctacagcacaaacttcgtcaagcaaaactagcaagaacacctgtgaattctgaagatttatgccgcgaaccgctctttgccgtgaaacatttgacgggtttcatttgtttattatgtttttattttcaacggcgtaccgcccggcataagccgaaacggcgtcgttccgatcagctcgccgtcagcgtgaaacggaattttcccatctgtttcaaaaacgaattccttcccctttatcatcgtcactccgtccattttgatatgccggccgaagctcatcgcccataaaaaacgatacagcgagaaaaaggacaggttttctgcgatgacaatatcaaaatggttttgacggggatttgctgaaggcgccgctttcatgccgcctccgtaataagggtgattagccgcaatgacaaaccagacattgcggaattcacgcttctggccgtctgccgtgcaaacaaatctgaacggctgaaaccccgaggccgtatgtaaatgcgcgagcgggtaaatcacaaagccgagacgcaaaaaccgaagaacgcgcgataacggaaaattcgcggctgccttcaaaactgaggcatcgaagccgacagacaggtggttaataaaataaagtgattgcgctttgtcatgaaaaaagttgatgtttcccgcaaaaaatttccgtgtgagcgggcggtgcagacttttgatttcttggaggagcgccgacttcttaataccgagccctttggaaaagtcattgtacgaaccggcgggcacaaaggtcagctcaatctgatccgttcctttcagtccgttaatgacttcatgcatcgtcccgtcaccgccgatgacgaacagccgcttaagcttatgatcctgcatcattgaaatctgtctcgccagcacctccgcatgtccgggatgcccggtcaaaaaagagcggtggctgaccccgcgcctggtcagctctttttgaactgatttccagacacgccggccccgcccgcctcctgagaccggattaataataaaaaaccattgactcatcgtttgttttcacctgcttcatagatgaagagacagccggcaaacgtccgctttaatcaagccattcctgtctccggcttgaatcgctcaagccgtaagacaaaagagccttcgccgccttcagctggtggtgcttgatcggcgccgtatttttctgctgcttttccagccaccctgcggcagtccgtttatcagctatttccagcccgtacggcggctccgggtaatcaatataagacgttctgctgagtaaaagcttccgcacgggaatgtcggcctgcttttcttttacgatttgcgaaacgaccgagcccgtccgctgcaggctgagagccggattcaatacttggcgtgtgctgccggagcctctttcttcccaaaaacggtgttttgatccgatatatacgctgtcctcttccgcttccataaaagcagcgcagaaaatctccagcggcgagatgatgatcatgctcagttcgacggacgcctgctgaatttgcagaaccggatgatacatcacaaaataggaatcgggcagcttttgagccagcatttttaacatcccgtcccttttgaccgcctgcgaaagctcagacttttgagaaagcgtggagctcgcccattttaattgaaagtcatacagctgatctttgaaaaaaggcgcaagctcagacttttgagacggaaggttcccgaacagcgcctcttctccctccggctcatcaaaccattggtgcctcttttcatttatatcggccgtattttcttcttttctcttttttaaggaaaattttttcctggccggcgcttgatcggtttccccgccggcagccgtttccgtttctttttcttccgtcatccggtcaaacgcttcaagaagcgcctcaaagcgttctttcttcagccggataaactggttcatataatgatatggatcaagttcatatctggatatgcagtcgtgaattttgatgatctgtgccatgtgatttctccactccgaatatttgtttatgtcaattgaaactgtgcgatttcttcgtatttaggcgaccggtcaagatgggtctgaaacagggaaaaccggctgacggcactttgcaccctgccgctttcaaacggcacatcgtcaggaaacggccggtctcccgcccacttccgcgccatcgtcatatgagggtgatacgggcgtttttccacttgaaaaccggctttcaaaacagcctgttttgttttttcccgcaaatcaaagagcagttcattccgttcgggctcaaggtgaagcactctcggctgtctgcggtcgccgaaaatatccagatgctgaaactgtacggtaaacggctgcgctgccgacgcagcatctgcgagcagagacgataatttcgcaagccgttcttcatccgcggctccgagaaaaatgagtgtaatatgatagtcatgcgggtgcacccattttttgaatgataacgccggctcctttttggctgcttcccaaatcggttcagcaatgtcagccggaatcggaatgccgataaaataatgcggcaatgaagctctcatacgaggatctccccctctttggttatggtgttattataaaacggataagcggagaggagaaccctgtccgctcattatgataggatattatgtaccgaacgttttatacagaaaggaatgagccggccttgaaaatcgtaaacagcacggcggagctgatcggcggcacaccgatcgtaaagctcaatcgtcttcagccagaacatgcagcacaggtctatttaaaattagaatcgtttaacccgagcggcagtgtcaaagacagagcggcttacaatatgatcattgaagcggaaaacagcgggcatttaaaacccggctccgtcatcatcgaaccgacaagcggcaacacaggcatcggcctggcgatgaacgcggcggcgcgcggctacaaggcaatcctcgtcatgcctgacacgatgacgaaagaacgcatcaacctcctgaaagcgtacggcgcggaggttgtgttaacaccgggggcggaaagaatgcccggcagcatcaaaaaagcgaaagaactcgccgaacagattccgggaagttttatcccgatgcaattcgataacggcgcaaatccagatgcccaccgaaaaacgaccgccattgaaatctatcaggccgttcagcagctcaacagaccgctcggtgcttttgtggcaacggcgggaacgggcggaaccattaccggaaccggagaaacgctgagggagcttttcccggatatgattgttcatgtcgccgagcccgcgggatctcccgtcctgtctggcggaaaacccggcgctcataagcttgtcgggacaagccccggatttattcccggcatactgaatcaggacgtttacgatgaaatcatgaaaatatctgatgaagatgcgtatacgacaacacgccgtctggcccgggaagaaggtatactcgtcggcccgtcttcaggcgccgcctgcttcgccgccattgaaaccgcaaaacgcctcccttccgaacagatcgtcatctgtatgacggccgatacgggagaacgttatttatcaacggatttatggtcatttgaatgataaaaagggatgccgctttcggcgtccctttttattatcacttggcaagctcataaatggcttcggcgtataaagcggttgaccggagaaggtcatcgatttcaatgtactcatccttttgatgcgcgctgtcaggccggccggggaacagcggcccgaacgcgacgcccgccgaaagggatctcgcatacgttcctccgccgattgaaatcagatccgctttctttcccgtctgtccttcgtaaaccttttgaagcgtctttacgagcggatgatcggcagaaacgtggtgcggtttgctgtctttaaattcttcaagccggaattcttcagcagacgtaaaagcatcacggatgactttgctgtctgaagtgacgggataacggatgttgatgccgagttctccttcctcaccctttctgtatgtaaaggtgccgacattcaatgtaagctctccgctgatgtcatccctgcaattaattttcagttttttgcctcgtgtatcatttgaaaaatagtcactgacggttttgacaaagtgctttccggcttcatccagctctgttccgttaaggcattcagcaagctttaagccggcattgacaccattatccggttccatcgcgtggcatgattttccgtatacccgaagcgtcagttttccattttccgaaactgcttcaccctgtgtttttgactgctcaagccatttgctgaaatatgcgtgcacggcatcaagaccgtccccttcaataaccgcttcagccgcatccggcaccatgttcaagcgcagtcctgaacggaacgacagaagcccgttttttgcgtctttgtcagaagcgctttttacaatgcgcagtgatgcatctataattcctttttccgcgttaatgatcggaaaatccgcgtcaggagcaaagccgatgtcaggcattttttcgtgtttgaagtagtgatccacgcatctccaatcactttcttcatccgttccgatgatgattctcacgcgtttggataaagggagctgcatgtctttgacgattttcagcgcataaaacgccgccattgtcggccctttatcatctatggcgcctctggcatatatccggccgtccctgatatcggctgaaaacggatcgctcgtccagccgtctccgggcggaacgacatcgacgtggcacagaacgccgacgatttcgtcacccgttccccattcaatatggcccgcatagccatcaagattctttacggtgaagccttctttttcaccgaattccagcagtgacgtcaggctggcattgacgccttctccaaacggccggccgggaccggctgttgattcgtccattacgctgttgatctgcaaaaacttctgcgtgtcacggatcagatcttctttgtttctgatgacttcaacttcccagttcatcacaaatcccctttcttgataaagacttgcaaaatgtcgataaaacgaataatatagatgatgttttgaaaaaatgttcgtcattggaggtacttatgtttcatctcgacaagcatcaaacgacaataaaaagagaaattaccgcgggattgaccacctttttcacaatggtgtatatcattgtcgtcaatccggtgatcctttccaatgcgggaattccgtttgaccaggtgttcaccgcgacgattatcgcttccattgtcggaactttatggatggctctcgctgcgaattttccgatcgccattgcccccggcatgggcttaaacgcgtatctcgcctttcacgttgtcggcacaggcagcggcattacgtatcagacggctttcagcgccgtttttattgcgggagtcatctttattattttatcgttaacgcctttaagaaaacaacttatagaagcgattccggacaatttaaaatacggaattacgaccggcatcggcttatttatcgcttttatcggcttacgccaatccggaatcatcacggctgataaatctaatctggtcgcactcggcgatcttcattcgcccgccgtcattttaacgcttatcggacttatcatcagtattgtactgatggtgctgaatgttaacggggctctgttcatcggaatggcgctgaccgctatcattgcctttttgaccggacagatccatttcgcgaaaggattcatgtccttcccgcgcctgccggaggggcttttgatcacaaatccgttcggagccctcggggatgtcgtgcatcacggtctgtacgccgttgtgttttcttttcttctcgttacgatttttgacacgaccggcaccatgatcggtgtcgccgaacaagcgggactgatcaaaaacaatcagctgccgaatgccagaagagcgcttttggctgattcgaccgctacgacggtgggaagcatcttcggcaccagcccgacgaccgcgttcgttgaatcttcagcaggtgtggcggccggcggaagaacgggtctgacggcgctgacgattgcggttatgtttgccgtttccatgtttttcagcccgcttgtcagcgtcttatcggaagtgtcagcgattacgtcaccggctctgattattgtcggcagcctgatgatgggtgctgtgtcgaatatccgctggaatgagcttgatgaagcgttcccggcctttctcgtcattttggcgatgcctttaacgtccagtatttcaaccggaatcgcactcggcttcatttcatatccgcttgttaaagcagctaagaaaaaatggcgcgaaatccatcctttagtcatcatcttcgccgtgctgttttttattcagctttttattttgaacggacattaagaaaaatccctttcctttttcggaaagggattttcacatataaagaacggaaagaatcgcggcaatgagacaccaggcggaacagatgacttggatgacggttaatgcgctgtttcgcgccctgaaatagtcatcactgtctctcttgataccgcttaaaaccggtttatccgtgatccggtcaaataaaagtgacgcggcatagcggctgacgatcgcaaacaaaatgaggactgccggcttcactaagagcggaagaacgagaataagagccgtaaaagccgcggttaaaaggtaaagctgccggagatacccgccgtttcggatcagcactttaaagaacaattctttccacgccgtatacgccgaccgttttgtaaagatgtgctttgagccgggatataaaaacggcttgctccgccctttatgtttaccattcgggagctgcacatcatggctgagcatcaaaacagaggccgcgaatgaaagcttgcgcctgttctcctcaagcacttcttcctcaaaggccgataatgtctccgtccctttccaagtcaaaagagcggaacagatgaacaatatacatcccgccggccaaagccaataccattcggcggcaaagacgatcataaaaaacgcacccgccatcagaaccatcactttcagccagcccgccgcctgattcccgaatgtccgcctgctgttttttctgtgccggtgcaccgctaatatcgcggtatggaagccgaacagacagcaaaacatacctgaatatgccggtaaggtacagtcaccgtattggcgccataagggaaataacaatacggcaagcgcaccccatttgataagggaaaggaacatcgaatacaaaagcgcgtaccgtttcagcttttgcatcagaagttttgcatgcaccaaaaatacgtgatccgcttccagcaaaaaggtatgaataaaacccgtgcacaacagcagggcactgaatacatacagccagccccatcctaatactcctgccgctccattaagaagccccctgccgttcagccattcagcatattgataaacggcaaatgcggcagcgggaagaacgatatacagcgcgaccgtccaatcaatgaccgtctgaaacaccttccattgataccgccaataatgaaacagcctttgaaaaaacaaagcccgcccggtcatcgctgactgctccgaaccgctgaataaaagcaatccagcagtgaacggctccccgttttttcctgaagctcctctaacgtgccttgaagaagcagagcgccctgatccagcaaataaaaccggtcgcagattttttccgctgtatccagaacatgagtgcacattaaaatccccgcgcccctttctttctcagcaatcagcatgtcggtaaacagctttgttgagatcggatcaagtccgataaaaggctcatcaatgatgtaaatatccggcttcgccaaaaatgcctgtatgagcatcaatttttgctgcatcccttttgaaaaaccggaaggcaaatcatgtgttacagacgtcagcgaaaactcttcaagcagccgccctgcccgctcacggcattcttccccttctataccccgcaatgacccggtcagctcgaggtgctcccaaagcgtcagttcatcataaaaactcggacgctccggtatgtaagcataagatgaatcattccactcaataccgccttctatatcccgggacagcccgagaaccgcctttatcactgtgcttttccccgcgccgttcgctccgattaaaccggcaatttcacccgcattgactgacagagatacatcagaaatcaccttcggcctgtcagcataaccggcgcagacaatgtttgcattcaataattctcccaaacttctcactcccccgttttcatacggacatgtataaaaaaagtttcagtttccataataataaaagcggaccgggcatagtaatgcaccaaggtggcacccatttggaaaaaattatctgcgcttattcctagattcatgttgtccatatcgtgtataatggaggcagttaaaagagaaaaaacagaatgtcatcctttgttgcttattcgtacgaagttttagagtcgaaagttgtggtatatcaagtccatccgatcttatgatagggagtggttttttgaaaccttcaacaaatcgtatgctgactcggattaaatcagtttacatgttcatccaggaaaaaggccttgtgacaacacaggaactggttgatgaattcggcattacacctagaaccattcagcgagacttaaatgtgttagcatacaatgatcttgttcatagtcctagccgaggcaagtgggagacaacacgaaaaaaagtgaaaattacatcttaagcgaacaattacataaggcccttttcggcctgacatgctgcaaggcaaagcagcgtctttgccttgttttttgttcctctatataaaaagcccaaaacaaatctgttttgggcttttctgatatcgattacacttcagcgcctctcagcgtttcgagctcctcttcagtcagctcgcggaattctcccggtttaagatccgggtcaagagaaacagcccccatcgaaagccgcttcaaataagccacttcatttccgacagcctttgccatcagcttcacctgatgatatttgccttctgtaatggtcaagtgaatcaccgtttcatccgggctttctgtaatgatttcaacggctgccggcttcgttttatagcctccttcaatgacgacgcctctttccagatgaacgatgtcttccggtgacagaggcgaggttaaccggacctcatatgttttaggcacatgttttttcggagaaagcaggcgatgagcgagctgcccgtcattggtcagaagcaaaaagccttccgtatccttatcaagacgtcctgccggaaacggttcaaatcgctgttcttcaggtgtcagcagatcaaccaccgtttgctggcggctgtcttcggtagcggacagcactccttgcggcttattcatcatgacataaataaattcacgatagtctgccggctctccgtataccgtgatgtcctgtttttccggatcgacatgggttttcacatctttcgccggctctccgtcaaccatgacagccccggccttgacgatttttttcacatcttttcttgagccgaatccgctgttggcaagcagcttatcaagtctcatcctgatcctctcctttaaaaagaaaagcccgcgataagcggactattcattatttctcaatgggcggaatgcctgcctctcctcaaaacacggggcagacggtttccaaacattttctgtaaaaatccgattcggtacgcggcaaacatgtacaccgcaccgccgacagcggcgcagacaaagacgacaatcgccgcatgcacctggccgctttggtatgttacaaagaaactgagcagccattgagtcagcttgaccgcgactcccatcacgacggacaggactgcgattaaaatgacccgttttataagtaccgtatacgaatagcccgcatggcgcttaatcataataaaaccgtacagaagagaagcgatataaccgagcgccgttgccaagatggccccgtctccctgaaacagcttgatcagcggcacgttcagcaccacttttataatgacgccgatgaaaaggctcacgacagcaaatttctgcttattaatcccttgcaggatcgcggcgtttacggtaaacagagaaaacagaatcgcgacaggcgcgtaccagaacaatatatcctgtccgatatccgggcgaagactttcagagccgtagaagaacgtataggccggacccgataacacggacatcccgacaacggcgggaataaccaaaaacagaatgatttgcatcgtctggttaatctgctggttcaaaagcttataattcctgctcgtaaacgattcagtaatcgtcggaatcagcgtcagaccgaaagcggtcgccagagaaaccgggatcatcacaagcttcggcacataaagggtgacaatcgcaagcatgtcctggctgatatccttatggcccgccgcaatcatcgctttattaaacgtattcgtatcaatataagaatacaaaggaatcgccagtccgacaaatacgtaaggagcggcataactgaaaagctcaatgaacatttttttataacttaagttcgcagacgggacgagattcggcttcatcgccagaagatcgcccttccgcttattccagtaaatataaaggacgacaagccctccgaatgatccgatcagcgccgcgaaagtcgcgtatccgactgcgatgacaaggccgccgttgatcactcttaaaatcaaatacgttgcgcccaataaaaagatgatccgggcaagctgctccacaacctgtgaaacggctgtcggccccatcatctgatgaccttggaaaaaaccgcgcacaagactcataatcggcacgaccaaaagtgccagactcaccatccggatgacataaacgacgtggtcaatcgtaagtccgttgttactcgtgccgccgagagatgtttccgcaaaaaacggcgccgaaatataaagaattgaaaaagcgatcatcccggttacgagcataaccgacattcccgctctcagcatccgcctgctcgtctcatagtctcctttggagttatatttcgagacaaattttgaaaccgcggcgggaaatcccatcgtggcaatgtttaaaaacagtgtatattgattatatccgtattgaaacaaagctccgcccgtcgctccgaccatcgctccgaacgggatcagataaatcatccctaaaatccgcgatatataggtgccgagcgtcagcacgaacgtgccccttaacaatttgcttgacatgtttcctcatcaccattttctacgaagattcaacttttctattttaacacaactgggcaattagacggtaataattgcagcgggaaactttttgggaaaaccctttaaaaaacaaaatacgtttaaggattccctttctttcgctataatagcagaaagcggacatttccgcctattatacgtgaaaaagaaagttgttgatgaaagatgaaacattatgacgtgattgtgatcggcggcggtccctccggtttaatggctgcgattgcggcaggcgaagaaggcgcggacgtattattaatcgataaaggaaacaagctgggacggaagctggcgatttccggcggcgggcgctgcaacgtgaccaaccgcctccccgttgaagaaatcatcaaacacatccccggcaacggccgctttttatacagcgcgttttccgaatttaataatgaagatatcatcgccttttttgaaaaactcggcattcagctgaaagaagaagaccacgggcgcatgttcccggtgacggacaaagcgcaaagcgttgtcgatgcgcttttgaaccgattaaaacaactgaacgtcaccatccgcacaaatgaaaaaatcaaagaagtgcggtacgagaacggcaggacagcgggcattacgacaaacaatgacgaacacattaacgcagacgccgtcattatcgcggtcggcggaaaatcagtcccgcataccggcagcaccggagacggctatgcatgggcggaagcggccggtcataccgtgaccgaactctttccgacggaagtgccggttacgtcgtcagaaccgtttattaaacaaaaaacacttcaggggctgtctcttagaaacgcggccgtcagcgtcctgaataaaaaaggcaaaccaatcgtcacacacgtgatggacatgctgtttacccatttcggcttgtcaggccccgccattctccgctgcagccagtttgtcgtcaaagaactgaaaaagcagccagaggtcaaactccgcatcgatctgtttcccggcatcaacgaggaagagttatttcaaaagatgcacaaggaactgaaagacgcaccgaaaaaagcgctcaaaaatgcgctgaagccgtggatgcaggaacggtacctgctttttcttctggaacggaacggtcttgatccgcagacaagctttacggaattgccgaaggatcaattcagggcttttgtcaaagactgcaaacaatttacggttgccgctgacggaacgctttctttggacaaagcgtttgtcacaggcggaggtgtttccgtaaaagagattgagccgaaacagatggcgtcaaaaaaaatggaaggcttatatttttgcggagaaatactcgatattcacggctataccgggggctacaatatcacttcagcctttgttacggggcgtctcgccggtttgaatgcaggacgtttctcacgctcgctctaaatggtttaaagcgcacttacctgagcgtccccgttgataattgaccaaaaacatgatagagttttctgcgttttgtttcacctgattgagggaataggaagaaaggattgatctgcaatcgtacgaccatactaaaacaaaatggcgtattgaaaaaaatagtcagagggtgagaacgtttgaagaagaacatctccagtgttttttggattgtgattgtcatcacagccgctgcggttttatggggggccatttctcctgacagcctgcagcaagtcactgatacggcacaaaaatttattacggattctttcggctggtattatctgctggtcgtttctatatttgtcggtttctgtctctttctcattgtaagtccgatcggcacaataaaactcggaaaacccggggaaaaaccggaattcggcttattatcatggtttgccatgcttttcagcgcaggcatgggaatcggtttggtattttacggggctgcggaaccgatcagccattacgccatcagctctccctcaggtgaaacagaaacgccccaagcatttcgtgatgcgctccggtacacatttttccactgggggctgcacgcttgggccatctatgcggttgtcgctttatgtatcgcatattttcaattcagaaaagacgcgcccggtttgatcagcagcacactgacaccgcttttgggcgataaagtaaacgggccgatcggcaaagcgattgactgtatcgccgtgtttgcgaccgttgtcggtgtggcgacaagcttagggctcggagcgactcagatcaacggcggtctgcattatttattcggcattccgaaaacattttccgttcagctgatcctgatcgctgtcgtgaccgtgttatttttgatttctgcgtggagcggcatcggcaaagggattaaatacttaagcaataccaacatggcgctcgcggctattttaatgatctttatgctcattgcaggcccgacggtgctgattatgaactcatttaccgattctatcggccaatatatccaaaatatcgtgcagatgagctttcgcttgtctccgaatgatccccaaaaacgcgaatggattaacagctggaccattttctattgggcctggtggatatcctggtcgccgtttgtcggcatttttatcgcccgtgtatcaaggggccggacgatccgggaatttttaatcggggtattggtgacaccttgtatattggctttcttatggtttgcgatcttcggtgtatccgcgatggatcttcagcagaaaggcgtattcaatgtcgcgggaatgtcaacggatacgatgctgtttggcgcactcagccactatccgctgacaatggtgacatccgtattaacgcttgttctgatcgctgtattctttattacatcagcggattcagcgacatttgtgcttggaatgcaaacgtcttacggctctttagacccgtcaaaccgggtgaaaatcatctggggcgtcatccagtccgccgtggcagcggttttgttatattccggcggtctggccgcactgcaaaacaccgccattcttgccgcggttccgttttcagtcgtgattcttctgatgattgtgtctctgtacaagtcattagcgagcgagcgaaaaggaatcaaacaagcggagaaataccaaaaaccgagaagtccccgcgtcaaaaaagcataatgcacaaagaagcccggcatttcgtccgggcttctttattttcggtataaaatgagagcggaaaaacaataaagctgctcaccttcaggatcacaggccgccgctaccgtatatttaatatcaacgagctgttcatcagaaatcccctttaaaaatgtattgacttcagtctgcagatccttttcatgctcctcatcaaaaacagctatcttcagcacatcaccctctcctttctctatcaatttattccggttcaattgaaatatgatagagaaaaacagattttcttttttactgatttttactaaaagtaaccaaaaatagttgttgaaaacgcttactctcgtatgataatatcattttaacaataaccaggtcatttctgtttagtaaatatttagtaaaaaggagatgcgaaatggtccgtctcaaagatattgccttacaggcatctgtatccagcgcgacagtatcgagaattttgaataaggatgactctttggctgtgactgatgaaacaagagaaaaagttctgaggatcgccgatgagctgggctatcagccgtcggcaaaaagacggaagaaccgcagccgcagcgattcagcgcccctgatcggcgttgtcagctgcctatcaccggaagaagaacggcaggatccttatttttcggcgatccgaaaaggcattgaggaagaatgctttcggcaaaaaatttttatcacatcttctatccatctcggttcttttcaaaagcatatgttttacgaactggacggcgtcatcgtcatcggcagcctgcaagacgaggcgcttacgaatatcagcgccgctttcaggcacgcggtgtttgttaacggcacccccgatcccgcccgctacgattctgtcagcgtggatttttatgccgcagcgcaaaaggcgatagaacatcttctgtcgctcggttaccagcggctcggttatatcggcggccgggagcgggagcataccgtcatagacggtgtaaacagcaataaaacgattgaggataagcgtctgaccgctttcttacaaatggccggcgccgagccggagcatgtactgatcggcgaatacagcatgcacgaagggttccggctgatgaatgaagccatcaaaggcggaagtctccccgatgccttttttatcgcaagtgattcgatggctgtcggcgctttaaaagccttgcaggaagccggccttcaagtcccgcgcgatacggcggttgtcagcttcaacggaattgatgaggcagaatacgccagcacgccgttatcaacggtaaaagtatacacggaagagatgggccggacgggtgtcaaattgcttctcgaccgtttaaacggcagaaccgtcccgctggccgtgacgctccccacttcattgattgtcagacaaagctgcggctcacaagaaaggaggtgacgtgtcccgcagcgtttatatcatttttaaaggaggaaaagatgaaacgcttactggctttgtttctttcttttacttgcatgatacttcccggctgctcggcagaacagagcggcgccggagaaaagcagaaaacattgacagtctattccaccatatcctcagacagcgaacgctccgtattcagaaagttggctgattcattccaaaaagaacatccggacattcaagtaaacgttcatttcccaggcaatgactacgaaaatatgatgagggtcagaatggcggccggtgatatgcccgatcttttcgacacacacggctgggccaaaatccgctacggagaatataccgccgacctcagcggcatgtcttggacgaagcggctcgatccgaatttaaacagcatgctcaaagacgccaaaggcagaatatacgccttccctctgaatcaggcaaaggacggactggcctacaatcgtacgttgttggaaaaatacggaataaaaccgccggaaacaatggatgattttatgaaggcattgagacagattaaagaaaaaagcggcggaacagtcatccccttctggtttgccggctatgagaaaagctcatttgcccaatattacgatcaattcgccgcaccgcttctcatcacagatcccgcacaccgttacaaaaaacaactgttaaacggaaccttccgctggacacacttcacctatttatcttacaaactgaaagagatgcaaaaggaaaacctgctcaatatagatgccgtgacggcaaaacggtcccagctcattgaactgatggcgcaaaacaaaatcgcctttacgctgcagggcggcaccctcggccaagacgtcgctcaaatcaatccgaaggtaaaagtcggcatcataccgaccccggccgtccacaagggagacgcgccggtttggatcggaggcgaacgttacacgctggcggcattcaaggattccccgcggcttgaagaagcgaaacagtttatcgcatttatggcccgacccgagcatgcaaaatcaattgccgaagcgacctcgcttccggccggattagtgaatgtgcaaacggacattttctacgcaaatgactataagcgctatcagcatattaaggtgcagccttattttgaccgcctttatttgccgaacggaatgtgggatgtgatgggaacagccgggcaggagctgatggccgatatcttaacccccgctgaaatttcagcgaaactcggcagggaatataagcggctccggcttcaatctgattcacggggagctgaaaaagaatgagtgatcttgcaaaagaaacccaaggatttcaacatcaaaagccggtaaaaccggcgtcactatggtggatgtacgtccccgctcttgccacggtttttattttcatgatttttccgtttgtcaaaggcgcttttattacatttacaaactggaacggcttctcacagacgtatcaatgggtgggggttactcaatataaaaggctttttacagatccggacacgtggcttgttgtgaaaaacactttgctttacggcatcggaagcactttttttcagaatatgctcggacttttatatgcgctgcttttgaatcagagcttaaaaatgaaggcgctcacaagaacgatcgtctacctgcccgtcattatcagtccgctgattatgggatacatttggtattttattttctcatatgacgggggtgcgctgaatgatgtgcttggcgcactgggaatcggtcctgtcaacgccttggcaagccctgcggcaaacccgtggattatcgtcatgattaacacgtatcaatacgcaggcattgcgatgattgtatatttggcggggctgcaaagcattccgaaagattattacgaagccgcaaaaatggatggcgcgggaggtcttcagccgtttttcaccatcaccctgcctttattgatgccggctgtcaccatcaacatggtcatcaatatcatcggcgggctgaagctgtttgatgtcattttcgcgctgaccgcaggcgggccgggcaattcctctcaatcgatgtcaacgtttatgtatgacctatattttaaacggcaggatgcgggatatgccgccgcccaaggcgtgtttatgtccgtcattattcttgtcatcagcttttcggctctcgtgtatttcaagcgaaaggagacggaaatgtcatgaaaacagcccgaatgcggatttttacgctgttggcagccgttatctcgtgcgttcatattgtccccttttatattttgctgaccacgtcattaaaagcaaaaggtgactacagttcaaaatggtcgctgccatccgccttttcatttcagaattttcgtgaagcatgggaacgtgcctctctcgggcaatcctttctgaacacgatcatcattacagccgtttccgccgctttattaattttcatgggttcgcttgccgcatacccgctcgcaagaagaaatacaaagctgaacaaaatcgtcttcggccttttgatttcaatcatgatcatcccgcctttgacttccatggttcctttatacaagatggtcgctgatgcggggctgatcaatacgcatgccgcagccattctcattaatacggctgcatatatgccgctgaccgttttcttatattcagggtttatccgctcctccattccgaaagagcttgaggaagccgccaggatcgacggcgcgggattgatcaggactttttatacaatcgtgtttcctttgttgaaaccgattaccgcaacggtctgcattatttcctgcgtgtttatctggaacgattaccaatttgcgattttctttttacaagatcaaaaggtgcagacattgaccgtggccatggcgggatttttcggcgaaaacgcgaacaatcttcacttagtcgccgcagccgcaattatggcgatgctgccgatggtcgtattgtttttggcgcttcaaaaatattttatctcagggctgtcctccggggcggtcaaaggctgagaagaaaagggaggaatttctgttgaagaaaattacgtttatcggagcggggagcacgattttcgcaaaaaatgtactgggggactgcttactgactgaagcattaaacgggtttgaattcgcgctttatgatattgacgctgtacggctgaaagaatcccagctcatgctggaaaacatgagagaccgctacaatacgagtatatccatcatctcctacgatgaccgaaaacaggcgctgaaacacgccggctatgtgataaacgccattcaggtcggcggctataaacccgcgacggttattgactttgacatcccgaagcggtacggtctccgccagacgattgccgataccgtcggaataggcggcattttccgttcccttcgcaccatccccgttttatttgacatcgcaaaagacatggaagaggtctgcccggatgcgtggctgttaaactatacaaatccgatggcctctctgaccggagcgatgctcagacatacaaatgtcaaaacggtcggcctgtgccacagcgtccaggtatgtaccaaagatctgtttgactcactcggcatggatcacgaagggacggaagaacgcattgccggcatcaaccatatggcttggcttttggagattaaaaaagacggaattgatttatatcctgaaattaaaagacgggcacgcgaaaaacaaaagacgaaacataaggacatggtgcggtttgagctgatggataaattcggctgctacgtaacggaatcatctgagcataatgccgaatatcacccgtattttataaaaagccggtatcctgagctgatagatgaactccaaattccgcttgatgaatatccgaggagatgcgcggaacaaatcaacaattgggaaacgatgagagacggcatcatcaacaaccaaaacctgacgcacgaacgctcaaaagaatacggttcgagaattattgaagcgatggagacgggcaaaccgttcacattcggcggcaatgtgctgaataccgggctaataccgaatctgccggcgaaagcggtcgttgaagtgccttgcacagccgtcaaaaaccacattatgccgtgctattcgggcgaacttcccgagcagctcgcggcgctcaacagaacaaacattaacacacagcttttaaccatcgaagcggccgttacattaaaaaaggaagccgtatatcaggcggccatgcttgacccgcatacaagcgccgagctttccatgaatgacatcatatctttgtgcgatgacttatttgaagcgcacaaagaccggcttccggcttatcactgatcattcgcgttccggtcctgggcgggccggacgcttttatatgttcagtaccagtttgaccgtctgtaaagtgtgtcctttaaaatcttcttcaaattcacatacccattgaaaccctttcgcttgataaaaggataaggcaatgcggttctctttttctgcatggacataaagcttttttaccccgccggactgcctgatgcattctttaaggagtgccgtgcctatcccgcttccctggcaatccgggtcaatatagatggcggtcagctccgcatttccgtctttttgaaccggggtggcatttgcaaaaccgagcactcgcccctcttcttctgccacaaagaacagagaatgcaagagccggcgttccatcatctcatcctgataggcggattcgagaaactgatcttgaatatgtctgggaataatcccttcatacgtatgatgccagcttcgttctgcgacttgccggacctgtttgatatcgtttgttttcatcgcgcggatcattggtttcacctgattcgcctcccgtttttttataaaaaaagaagaaaaagacgcacgtcccttttcttctttcacttcaaagcgttatttcttcggctttgtttcgccttcccactccagcatgccgccttcaacattaaccgtacggaagccctgctcatgtaaatacatacaaacgttcatgcttctttttccggaacggcagataaatacatattccttgtccttgtctaacgcatccatcttctcagggatgtcccccatgcggatgtgaacggcctccggaatcattccttcggcaacttcttcgtcttctctgacatcaatcagatacagctcttctcccgcttttaatttttcttccagtgcagctgtgctgatttcatttattttcaatgtgtgacactcccattcatctttatggtattaagtataccaaagcccgcggtgcaatttctatgatagaggcctggtaaaaaagcccctctctgtaggagaggggcttcgcccggtcagtttgccacgatattgacaagcttgcccggtacggcaatgatttttcggatcgtttttccttcaagctgctcttttactttttcgtcagcttgtgcgagctgttctaacgctgctttatcagcatcagccggaaccattaatttcgcttttacttttccgttcagctggacgacgatttccacttcatcgtccaccagttttgattcgtcataggcaggccaagcctcatatgcaatcgaaccttcgtggccgagtttttcccacagttcttccgccaaatgcggcgcaataggagaaagcagcttcacaaaaccttcgatatattctctcggcagttcattcgctttgtaagcttcattaatgaagaccatcagctgagaaatgcccgtgttaaaacgaagggcttcgaagttttctgtcactttcatgaccgtttcatgatagacgcgctcaagagtttcgcctgcgccttctgtcactttgcccgtcagctcgccgttttcctcgataaacaaacgccatacgcggtcaaggaagcggcgcgctccgtcaagacctgattcagaccaagcgatagatgcatcaagcggccccataaacatttcgtacaggcggagcgtatccgctccgtgagacgccacaatttcatccggattgacgacgtttccgcgggatttactcattttttcattgttttccccgagaatcattccttggttatacagcttttggaacggttctttcgtcggcacgacaccgatatcgtagaggaatttatgccagaaacgcgcgtacagaaggtgaagcacggcatgctccgctcctccaatgtaaatatcaacgggcagccatttatccagtttctcaggtgaagcgagctgatccggatttttcgggtcgataaagcggaggaaataccagcagcttcccgcccattgcggcatcgtgttcgtttctcttctgccttttttgcccgtttcaggatcagtgacttccacccactctttaatgttggcaagcggtgattcacctgttccgctcggtttgatctcatcggttttcggcagaatcagcggcagctcttccgccggaacggctgttgacgtgccgtcttcccaatgaatgaccggaatcggctcgccccaatagcgctggcggctgaacagccaatcacgcaggcggtatgtcacttttttctcaccgtttttcgtttcttcaagccaggcgatcattttttcaatcgcttccgctttattcagtccgttcagaaagccggaattgacatgctctccgtctcccgtgtacgcttcttcttccgtgtttccgccttttacgacttctttgacaggcaggctgaacactttggcgaattcaaaatcacgttcgtcatgcgccggcacggccattacagcgcctgttccgtaagaggcgaggacataatccgctatccagatcggcagcttttccccgtttgcagggtttacggcatatgcgcccgtgaagacgcccgtttttgttttcgcaagatccgtccgttccaggtcacttttcgcctgaacttctttaacataagcatctaccgcttctttttgttcaggcgtcgtgatggcctcaacaagctcatgctcaggagccagtacggcataagccgcgccgaacagcgtgtccggtcttgtcgtaaacacggtaaacgtgtcatcagtgccgtcgatcgcgaaatgcacgtttgcgccttctgagcgtccgatccagttgcgctgcatgtctttaatgctttccggccagtcaaggtcttctaaatcttcaagaagcctgtccgcataagcggtgattttcagcatccattgtctcatcgggcggcgttcaaccggatggccgccccgctcgcttttgccgtcaatgacttcttcgttcgcaagcaccgttccgagcgccgggcaccagttgaccggcacttcgtctacgtaagcgagccctttttcgtacagcttggtgaagatccactgcgtccacttgtaatagtccggatcagtcgtattgatttcacgatcccaatcatatgaaaatccgagcgattgaatctggcggcggaaattatctatattttgttttgtgaactcagccggatcattccccgtgtcaagcgcgtattgctcggcaggaagcccgaacgcgtcccatcccatcggatgaagcacattgtatccttgcatgcgtctcatgcgcgaaaggatatcggttgccgtatagccttccggatgtccgacatgaaggccggctcctgaaggatacgggaacatgtcaagcgcgtaaaacttcggcttgtcattctcttcactgacggcgaacgttttatgatccaaccagtaattctgccatttcttttctattttttcatgctgaaaactcaacgtaaaaacctccttctgattgaatacggcgtatgtagtccaagtattgacgggatgagaaagattatattcagattattctaaaactaaaaaaactccctcatcccaaaaagggacgagagatttttatttcccgcggtaccaccctcgttagcacggttttgagccgcactcacttgatacttttaacgcagttatgcgtcagcggttttgccgctgcaactctgaggcgagttcggaaacagacttgattgacttgcaccggccgtcaactctctgattgcaaaatctgcttcttactgctcctcttcactgttcttatcgctaccgtaatcttacctgtattttatagaattctgttcataagtgcaagcaggtttgtatacaatgggaatgtacccggaacgggtcatgagcggggatattattttgatggaggatttttttgctggtgtggttttgcttcggccgaatcactgttttgttctctgacaaaatcaaagctcctgagaacagcttctccgccgtagcctgcgattatggataagatgacgagttgaattcctgaatcggggtcagcggataagacaagtaagatggaagcagccattccgataaaaccatcttccaaaaaaccgagatagataaaccgctttgtcattctgggtttctccagcctgcctctctttttcacatgaccgagaacccccatgatgcctccaattacacaagcaattattacctgatgcagcatcttcatcaccttcctaaagcccttatttagtaaagcgacttcaggccatccagcccccttacgaatacgatgattttcgatatctacataccggcgattgagcaggaaagtaaaaagcttgtttcttccattatatgtgaacacatgatcggtaagcttgatgcattagattcatttttcacccagtgacaatgacctagttacttacttagcgatgatgtgccttccccttatatattcagtgtatatgaggacaagcccgaatgacaaattgcaaactccggctgcttgaatcagaacatatgttatgctacggttactgtagattcatttaaaaaggggagaaacaatggctgaaaaagcgcacagctttactgccaaaagggggttttacatggctgactcaaatgtattcggaaaactggagcagctggagcttatcaaaaaggcgcttgatcacgcacgcatcggcgtggtgattacagacccctctcttgaggacaatcccatcatatatacaaatcagggatttatggatatgacaggctactcttccgaagagatattaggtaagaactgcagatttctgcaaagcaaagaaaccgaccgtcaacaagtcgcgaaaataagaaagagcttaaaccagaaagaaaagatcacggtacggctgaaaaatgtcaaaaaagacggcaccccattttggaatgaactcaacattgatcctctgtatgttgaagacaagctctattttgtcggttttcaaaaagacatcacagagcagaaagaatacgaaaagctccttgaggattccctcgcagaaatcacgacgctgtcaacgccgattgttccgatccgaaacggcatctccgctttgccgttagtgggaaacttaacggaagaacgatttgattcaatcgtgacaactttgacggacatattaaccgcatctaaagatgattacttaattatagacttatcaggtctggccgaggtaaacgaacagaccgctgaccggattttcaaattgcaccacctgcttaaattaatcggcacggaattgattatcaccgggatcaagccttccctcgccatgagaatgaatcagcttgatgccagcttttcttcattaaagacgtatttaaacgttaaggacgcggtcaacgtgcttccggtcgtataaacaaaaaaatcccgccgaaacagcgggatttttttatgtcgtcatcgcacttggacgttttgtttattaacggttttcaagcgtttgtcgtacagcaccgtcgctgcgatgctgacaacaagaagcaccatcaggatcaacagcagcacgctcatgccgtactgatcaaccagcacgccgccaaggagcggcccgatcattctgccgcccgtcgccgcactgttgacgaatccttggtaaaacccttctttccccttaggcgcaagctgattggcaatggtaggcacggcaggccagacaagcatttctccgacggttaaaatcaccattgcggtgaggtacatcggaaattgcttggcgctgagaagcacgccgaacgaaacgataaaaatacaaaagccaatgaccatctgcgtttttaacgcaccggaccattttttcagaacaactcctatgagaggctgtccggcgacaattaatattccgtttacggtccagagcacactgtataatgaaagcggcataccgatgctttgagtatgtgacgcaacggttgtggaccactgcgaataggcaatccacccgagaacatacccgccgctcaatatgagaagcgccgtaaatttcgttctgctgctgacaggctcgtagtccagaacagaagcctggctcgcatttccggttttgatatttcgaaacccgaaaaatacgataaggaaaaacagcacatacagcatagcattggctaaaaacacgtacgtaaacgagtacgccgcaaccatcccgccgagtgccgagcccacggcgacacctgcgttctgagctacataaatcgcattaaaagctctccgcccgccttctttccataccgctcccgccatggcgtaactggccggaaacacgataccggaaccgaagccgacaatgatgagcagccaaatataaacgggccattgatgaaacagaacgagtccgagaagacttgccaatgtgatcataatgcccagcataatggatttgaatccgccgattttatcaaacaaaaatccgccgcataaattccccgccacactggccccggaattcagcatcagaacaatccccgcaacagtcagcgatttccctaaatgattatgaatatagatcgtattcagcggccacaaaaaagatgcgcccgtcacattgataaacattccgatgattaatatcttcaaagcacgcggcataccgatccccctctctatataaaaaaccccatgaaaaaacggaaaccgcaagccgcggctccgtatcgaacacgttatcatagcacattcattctatcgccgcggacgtcttttttcaacatcagaatctgaaaaaaataatgccggaatgttgaaaaaattacaaatgattggattcacaaaaacaggccggcctcatgctcttttcctcagcagccaaaacgggatatacagaatgaaaaagctcaatatcaccgccgcttccattgatagaagataccacggccaaggtccgaaaacattcagaagcgaagcggtcttcggttttttcattaaatataagtaatttgcattcagcacacgatcaataaataagacacacgccccgtacagatttacgatcagcaccgatacccacagtccgcgcaccgacggtctatacttttctgcagcggccatgaatagacaggtaagaaaaacacagccgtgggagacgaaaaacacgatgtaccgaaaatgagggaaagaatacgcccctaaatcaggtgttgccatcgcctgtacggcgctgcccaaaccggcaaaatagaggaaggcgaacagttttttgctttttgtcatgaccatcagcatcgccaaatagacggaaaggtcgctcagctgcagcggcagagctgttttcagcgaccaggcatgatgacaaagcagccatatatgatagctgatctgcgacacggcaaggagaatgaacagcacatatcggaaaacgcgattcggccggccgtgattgagctgtttccggaatatgatcacgcacaccccaagcaatccgatgaccaaaagcgtgaaaatgtgttccctggaaaatagatgaaaggcccctgtttcagatttcaattgaaaatacttctgcataaggctcccccgcgcgaaaaaatgacgtatgtctattcttttaaaaatcgctttcttctattcataaaaaaaaagcctccgcttatgcggaggctcctcaacttgttttacaaggcggattgaatgacctttttatagtatagcaccgacagcatgccgaagatggagtacagcagcgtatacagcgccatgacgatgatcatcggcgtccacacttccgttccgaataaaaaccatcctgactgaacggcaaaatagctgtggaacagcccgagaatgagcggaatcccgaaatgatacgcctgcttccggcggatgcctttcagcagatctcccgttgtgaagccgagcttccgcaatatcgtgtaatcagccttctcatcctcacactcgcccatttgtttaaaataaaggatacagcctgaggtgatcagaaaggttaatcctaaaaacccgacaataaacatgaccagccccatgtttttcttttgggtgtcagccgtttcaaattgtgaaagcgcgccgtcagaatagtgctgcgcctgaaacagaccatcagctttttggatgtcctcttcacgtttgagtgtaatgccgaaaaaccgatttgattttccctgaatggacgggtcgatatctttctcgatccggtcaaatacctgctgcgtgacgataacggtcggcagccctccgcttgtaaatgtatatgacaggaggaagtcgttcttcaagcccttatacgccagcggtattttatccgttttgccgtttatatcaatggaacctgacgttttcaggtcgagaaatcttttcatcatatcattatatccggtaaacacggcttctccgtcagaaagctctgtcccttctgcgtctttctcgcttataatcggcagcgccaagctggacgggtcttgttgaaagcttttcatgtcgccgtttatgatgttcttcatattgacaccggcttgaatggtcttgattgttttcactttgtgttcaattccgtttttcttcaataaagcggtaaatgagtcagtctccttttggttatcaaacgcaaagtccgcggctgtattttgctcagccgatttttccgcggaatagtacgagatatagcttaaagacagcaaaccgattgccagcgccgaaagagtcgtaataatcgtcagcaggacggcgtttgacttcatccggaacatgatggatgacaaagacagcacttcactgacattcagatacccgccttttgatttccggatgagatttgccagaaagctgaccgaacctttataaaacagataggttccgataatgaccgagccgagaataaacaccatggccgaaaacagttcattcatgctcgtaaaactgcctccgaataaatccgcggacacggcatagccggcgataatggccgcaataccgacaacaccgatcgacatctgcacccaagaaagccgtcttatgccgctttctgacgatgacgcggttttaaataaagacaaaatgctttgccgtttaataaataagtaattcatcatcataatcagcacgtaaatcgccccgaacacaattaacgtctgaacgagcgccttgcttgaaaaaaacagtgagacagaggctttcacaccgactgtatgaaacagcatcatcatacataatttcgagagagaaaagccggcaaaaataccgatccaaatcgatccgaaatacaaaatgaaattttctgtgctgagtatgcggaaaatgtgcattttcgtcatgccgattaatcggaataagccgatttcccggccgcgccgtttaataaaaatggtgttggcgtataaaagaaataccgacacgatcgccacaagcagtacagaggcggcccggattgccgccgctccttttatggagcttttcatttcatcaagcgccggatcgtattgcatcgtgacaaacgcgaaataaagggcggcgctgaacaccagcgcaaaaacgtaaaggtaatagtttttcaaattctttttcaggttctggaagatcaaatgatgaatactcatgcctgaaccccgcccaatacactttgcgttttcataatatcctgaaaaaagtccggtctgtcctggccgcctttattcagctgtgtatacacacggccgtctttaatgaaaaccacacgtccggaatagctggcggcaaccggatcatgcgtcaccatcacaatggtggcgcggcgtttttgattcaggcggctgagtttattcagtaaatccatggcagcctttgaatcgagcgctccggtcggctcatcagcaaaaataatgcccggctcgtgaataacagctcttgcggcagacgtccgctgtttttgcccgccggaaatttcactcggatacttatgtcgcaaatcatagatcccaagctcctctgccgtctcggcaaatcgcaggtccgcctctttcttagacattttcgtaatggataacggcaggagtatgttttctttcacggtcagggtgtccaataaattataatcctgaaaaataaagcctagatgccgttttctgaattcggcaagctgtttttctttcatggatgtaatctccgtctcattcagtttaatggtgcccgcgctcactttatcaatggaggaaagcacattcaaaagggtcgttttccctgatcccgacgggcccataatgctgacgaattcccctttgtgaatctgaagatcaattcctttcagcacctcttgtttattcagcttgtttccgtagcttttttggatattgcctgcttctaaaatcatcacgttctgattctccttttacattggttatctttattttaaaaacagaagccgtttttttcgtttgattaagcgaacaaaagagaaaagcatgtgacacttttgtcacacgctgaacatgctgacggcatcgttctgtttcggaaacaccaaggtaaaaaccgtgccgctttccggctcagagcgcacgctgatctggataagaagcggagccgcggctttttgagccaaatacaggcccatccccgttgacgcgtgatcacgcctcattcgcgtcgaggtaaatcccttttcaaaaatgcgcggaagatctttgggctcgatgccgatgccgcggtcttcgatttccacatgcacccggccgttttgttcatagctttttacggtaatgtcatccgcctcactgtatttgacggcattgcttaacagctgcctgatgatgaaggaaagccattttccgtcactgagaacgtccggtgaatcgagctgaatgtcaaacccgatccctttttgtatacaccaagattgcagatttttaatttctttgaaaacgagcggcctgagctgaattcgctggaatgataaatcattttcaataaaggacaatcgtttctgatgaagctgctggtccagaagatggtgaatccgcagccattcatacagcaaaggggctttgagcggctgttcatcaaggcgctcaatcatgagatgcatcgctgtcagcggtgttttgacctcgtgaatccatgacatcagatcgtccttttcatgctctgaacccgcccgaagatcaagtgagctttttcttaactgctctgtctgcccttcaatgctttcttcaacgatagactcaaacggactgtcaggcgctttaaggtaagacatgtctaaattggcgtcccactctcttaagcttttataataggcggtctctttacgatagcggaacaagagaaatacaagaaacacaagaagcgacaggtaaacgaaatacagcaccgaaaaaaacggaatagacggatcaatatatgccgcaaaaaggagcacagcctgctgaaaaagaaacatcgcgatccagctctttctttcgagcagaaatgatttaatcataaagaccgtcttcttcctttgcgatgtatccctgccccaccttggtttcaatcattttcccgatgcctaattgatcgagttttttccgcagccggttgacattcaccgtcagcgtattatcactgacgaaacgctcatcattccataggcttctgatgagttcttcccggctgacgattttatttttctgctcagccagcagttttaagatcagcatttcgtttttggtcagctcgaccgaaccgtttttacggctgaccgtgttggtttctgtgtcaatgaccgccccgcaccatcttttcatcagcgccggttctgtgccgtattgatgcacacggcggaacaccgcctgtattttcgcgattaacacatcaaagtgaaaaggcttctgaataaaatcatctgccccgagctgcatcgacatgaccatatccgcgggatgatcgcgcgaggacaaaaagagaatcggcacgtttgattgggagcgtatcattctgcaccaatgaaagccgtcaaatttcggcagctgtacatcaatgatcaccaaatcaggcttgatttcggtaaactcccggatgacccggctgaaatcttttattccgtgcaccgcaaatgaccagcccgttaatctctctttcatctcgtgaaataaagtgttatcatcttctattaacaaaatgtgaaacatggtatccgcccttttctgatagatagaggaaaaaccggctgatgtccagccggcttttttcctttacagttctcttcttaatgcggtcagaacgttggtttttgtcgctttgcgggccggattcataccggaaatcaccgcgacccccgcacaaatgacaactgcgatcacaacgaggctgagcgggatataggagaaggtataatgaagatcttcggctccggtatttccccctaccgctttcaagataaccggcacagccagattgacggcaaaactcactccgtaagaaatgataatcccgatgacagaacctaatatcccgatataggcgctttccatcaggaacattctgcggatgatggacgggcttgcgccgatcgctttcataatcccgatttcctgcgttcgttccgtcaccgccatcgtcatcgtattgaaaataccgatggcagaaatcacgacggcgataaagccgacaaagatcaggccgattttaaagacgaggaaaaaggtgttgacgcccttcagctcggttgtgacagatctgacataaaagccgtcatcggtgaggtcatgggtaagctgatcgacatgatcgaatttgtctgcatacacattgatgcttttttccgcatttccattcttcagatccaagaatgttgagaagtccttcttgaattgatcactcacaaaaatatttgtatcctccatccaatcttgggacggtttttttgtaattccgactactttaaagtcgtacgttttcgttttctcaacgtctccgtctttgttagttttggagatgctcagctgtatcgttttattaagcaggtctttcgtatagccttttggttttttcacctccgacatgtcgccttggtgatcatttaactctttgtcgtaagcgtcagcctcttttttcgtcaataggttcttcgcaaaatcatagccgaccacgatttcattctctgtgcgggcgactcttccctgatcaagctccatattggctttgacttcatcgttcatgtttgtcagcacaatggctgaatcttcatttgttcggtttcccaatgacgctttgttcggttcatacacttgtgttctttcaacgacagacttgacatttttatacttttccaagtctgacttcttcacggcttttccgttctcttggccgagcacattgatttccgtaacaatctgctggctcatggtaatgtctgtaatcgttttttggatgccgaatccgacggacgccagcaccactaaaaacgcgcacgccattgtcgtcgccagcaccgtcatgaaaacacgcagccggtttttcttcatatttcttctgataaagtgaatctgatccttaaatctcaacagtaacgcccccttttaatacaccgtcatgcagctggaattttgaatgcgcgatcgaagcgacttcatcgtcatgcgtaatgatgacaaatgtaatcccgcgctcccggttcagctgctgaattaatgcaagcacctcaagttccgtttctgaatcaaggcttcccgtcggctcatcagctaaaataattgacggatttaaaatcagggctcttgcgatactgacacgctgctgctggccgcctgacagctcattcggataatgattcgcatgactctcaagtccgacccgtttcagcatgtccgcgactttctgcttgcgttcagacggtttgacgccttttaaggcaagcggcatttcaacattttcataggttgtcagactcggaatgagctgaaaactttgaaaaataaaaccgaagtgcccgaggcggaactgcgcccactctttttcactgaagcccgtcacatcagtgccgttaatgacgatacggcccttcgtcggcgctatgtatccggatattaaattcagaagcgttgattttccggaaccgctccgcccgacgatacaggcaatttcccctttttcaacggtcaaagagacatccttcagcaccggaacctcactctctctgcctttcctgccgattttaaatgaatgatcaatatgctgtacttctatcacgtacaccactcccccttatatctgtttcgtttttttatagatgaagtaataactgatgaaaaacccgataaccgtgccgataagcatgccgaatatgtaaccggtatacgaaccgttataagcatatccgcacacccccgcacttcccagcatactgagcgacatgacgagcacttgaatgatgcgttcaatgtgtttgctcaggataaaatgtccgcttcgttcactcggcattttaaggaaattcacatagccgaatagatagaaacaaaatcccattaatgcggagattaacaatgcgtgtttcatgtaatacatccatgatgtatggatgtaagcggcaggcatgaaatagatcagaaatccgctccaagggaaatcaatatccggcacagcctgcctgccaaaaaggaactcagcgtttaacaggtaaatcgtcataaccacgatcggaaagacggaaaccgtgaacgctgtgatcagctgcgccgctaaattgcccgttatcgtgccggcagctgtcactaatgcataaatcatcaagctgatgaccagcatccctgcgctgaacgattgaaaatgatggacagcgtcagttttaagcgctagaaacaatatgtcagatactccgtaagaaacaaattgcgagccggctaacacagctgctcccaagaaaaacttcgtatgaaatatccggcttctcgaatacggaaggctcagtgtaaacatcctttcagcccggcctcctcttatcagaaaaagccccatcataaccggaggaatgaaatgaagcccaatcaaattccgattgctgtaatcaatgctgaacgtacaaactgaacctgaatattgatgaagcacactcaaacaatccttatagtgaaaatactcatttataattgccaaagggcctaaaatagctaagaaccccgctgtaaggagcagcagcgtctgccgctgcttccattctttataaagcaaaccgctaatcggcaccttgccttcctccaaactgctcattttcaaacagatctacatatgctttgacttcctgtaaaccgtaaaataactgatgaaaaacccgataaccgcgccgaagataatgccggctaaatagccgaacatcgtgtctgtgaccccgtatccgaaaacgccgaaacccataacggcaaaggcaatcaccaagatctgcgccggccggtccaacttactccaaagaaagaatctgccgttccgttcattcggatgtttcagaaagctgacgtaaccgatcagataaaagacaaggctcatcacaatcggaatgattaaaaccaaatccctttctctgatccagtcgttaaacacatatccaataggggttacaaatataaaaagacgggattcgatataactgctgataaaagaaaattgacttcccacactaatatcgaaaacgacctccaaattcgcggccggcagaccgatgagtaaaaagggcagaaccgtgacggtaaacgccgttaacagctgggcgaatatctgtcccgttaatgcgccggatgccattaacaaggcgtaagccataaaactgatgacaatcattccgattgaaaaatgatcaaaatcgtacgtatggctcggtttcagcaaagatatcagcaatgacgccgctccatagcctatcgcctgaggaacaacaatgactgctgcgccaagccagaatttcgtctgaaagatttggcccctgctgtatggcatgcttaacaaagcatccatcgttccctttgtccgttccaagcctaataagaagacagcaatgatgacactcacaatccagctgaaggaaagaggcgacccattcgtataattgacaacgaattcacaatcttgaagagctgggttattcaaacattcctgatatgttgagtagttgttataaaccataaaagggtttgccgccattaaaagaatgccgctgcataaaaacaaccactgattttttttccattctgtgtacaacaatccccgcggtatcattccggtcctcctctcttacacatgctttgtttttttataaatcacaaaataactgactaaaaatccgaccgctcccccgacaatcattccggccacatatcctgtcatcgtatgtcccgtcgagtaccccgccaggccaaaaccgagaacggcgattatgatcaccacaaattgaatgggccggtcaagctgtctccaaaggaaaaaacggccgttccgttccaccggctgcctgacatagcaaaagtacccgatggcataaaatacaatgctcatcactgccgggatgattaatatatacttgctggcagatacccagtctgtatcaatgtacatgatcggattcaagtattgaaaaagattgtatactttgatataagcatcgactgacggcatcagctcatacatgccggctccgaagatgacttctacattggacaacggcaacgtaatgatcaagtatggtgatatcgacacagtaaacgccgttaacagctgggcgaacgtattccccgttaagcagcccgcgctcgcaaccaatgtaaaagccaaaacactcacaataatctctccgacgctgtaatggtgaaagaaatatacgcgctcaggctttaacagaagaatgagcagctcagccagcccgtagccgatcacctgagcgccggcaatgaccgccgctccgagccaaaatttagtgtgaaacacctgagcgcgggaataaggcagactgaaaagcgcatcaatcgttcctttcgtacgttccagtccgaataagcaaaccgccaaaatcacagcgggcgcccagtttaagttcagcattccgctatccaaagaattcacataaaacttacaatatgctccgtgggtgtccagacagccttgataaaccagataggtatttaacacttcaaatggattgaccgccgctaaaaaaatgccgaccatcacaagaacagttcgattctgcacccattccctgtacagcaatcccctgtctaccatctccggttccctccaaacttcgcaatgaagacctcttctaagttcacaggaagttcattccatactttcggccgcagctcttgcagaaagttctttttcttctcatcgttcttttgaatcagcaccgtataaaacacaccggcatggtcgagaatcggtatgttttgttctctgatcttcaaggcgacgtcctcttcaaatgccatttggattttcatgtactcttccttcatatcatccaagtccatcacattcgtcagctgatttccttccaaaaacccgatccggttgcacattcgctcaatatcttctaaacggtgtgaggtaatcagaatgctcgtttcccgttcagccacttcatccaccataagctgcagcacgtcatgacgcgttacggcgtcaattccgtccgtcggttcatccaaaaggataagagccgggcgtgaagcaaaagcaaggacgagtgcaagctgttttttcaggcctgtcgataattcacggtatttcttcgtttccggaatgccgtacctgttcatcagctcattggcgtaagtcacatcaaaattcggatagattctgcttacaatcgcaacaagctgtttatatgtatacttgtcataaaaaggattttcaacaggcatataaatgatgttctgttttactttcggatgccgctttatttccacctgattaaataaaaccgtcccttgatccggcagcagaatctgctgaatgagccggagcagtgttgttttccctgatccgtttcgcccgagcagcccgaaaatttcaccttttccgatggtgagcgaaatatccttgagcacttctttaccgtctatcgtttttgagagattccgcaattcaatcatgatccttgcctcctttcacatcagcgctgatttcctttatccattcctgcagcttctccagctcaactcccgcgtaatgggcatcgatgatgagctgtttcaattgctcttttatcatcgtcatcttcccttcaaccaatgtcgtttttgcattctccgatatatacgttcctcttcccctcagcgtttcaatgacaccatcgcgttcgagctccttgtacgctttgctgactgtgttcggattggcgataatgatcgttgccaattctctgacagaaggaagtttatcccccggcttcatgatcccttttaaacaaagctctttcaattgctgtatgatctgctcataaatcggagttgagcttctcggatcgatttgaatcatttacttcccttctttcttttacgagctgctctctttctttaaatgttctgccattgaaaaccgatgacgacaagaacgacaaacagactgcttgccaaaaccgaggcggcgataataagaggcacatcttgttttacggatcttttgtttttcatgaaagttccccttccctatggttaacatttatatgtcgatttcatttttcgagtgttttatgtgtattacatcaagtagtacacgtaatacaataaacacactccgccctattgtcaattctttttttaaaagaaatacaaaaaaacccgccgggattccggcaggtttgctgaaccatttgaaatggcgcggtcagtaatcaaaattacgctgcaaaatcatattgttttgcaaggtctgcagctgcaatctcattcggtaaagctgctctctttgctgatcattcgcagataatgacagcttgtttaattcattcaccgcgttttcaagcatcatttgcgcttcactgtactcattatcattataatgctcttgtttcgaagcggtcataaattgctcattcgcaaattcatacgcctgttcgcttctttggagatgttcatctactgattgtcttgttgccaacgaaacccctcctcagtgaatgggaaatcaaacttagtttgagcggaccaaaaataataacacccgaaggttgcaggaaagagaaccaaattttccgcgtttaagctaaaagaatgagaatcctgcccgcagtcataataaacaaaagaaagccgcatcctgttttcagattgtgaacccccatcattcatgctacaattttaggatgcatctgatgtgagggaggctttttgaacattgaacgagaataacccttttccttattcaaatacggaaaaacggtaccatacattaaattatcatctgcgggagcatttcgggcataaagtgtttaaagtcgcgcttgacggcggttttgactgcccgaatcgggacggcacggttgcacacggaggctgtacattctgcagcgcggcgggctccggcgattttgccggcaatcgggccgatgacttactcacgcaatttcacgatatcaaaaaccgcatgcacgaaaagtggaaagacggcaaatatatcgcatatttccaagcgttcacgaatacgcatgccccggtagaggagctgcgtgaaaaattcgaatccgtcctcaagcttgacggcgttgtcggcatgtcgatcgcgacccgtccggactgccttccggacgatgtcgtggaatatttggccgaactgaatgagcggacctatttgtgggttgaactcgggctgcagaccgtgcatgagcggaccgcccttctgatcaaccgcgcccatgattttgactgctatgttgagggcgtcaataaactgagaaaacacggcatccgcgtttgttcccatatcattaacgggcttccgcttgaaaacagggacatgatgatggagacggccaaagccgtcgctgatttggatgtgcaaggcattaaaattcacctgcttcacttattaaaaggcacaccgatggtgaagcaatatgaaaaaggaaagctggagttcctttctcaagaagaatatgtaagtcttgtatgtgatcagctcgaaatcattcccccggaaatgatcgttcaccgcattacgggagacgggccgatcgaattaatggtcggaccgatgtggagcgtcaataagtgggaagtactgggcgccattcaaaaagagctggaaacacggggaagctatcaaggaaagctcttcagaaagatcggggaggagaccgccctatgaccttgatgcacatcctccctttcagtaaagaattgctgaagtccgccgcacaggaaggtgatatcacggttgacgcgacgatgggcaacggacatgatacatatttcctggccggccttgtcggtgagacaggacatgtccatgcctttgatattcaagcggacgcactcgctaaaacgaaggagcggctcggtgccgacttcagtccgcgcgtcacgcttcaccataagagccatgatcaaataaaggcatcgctgcctgaggatgcgcacggtcgtgtggcttgcgccgtgtttaatctcggctatctgcccggcggcgataaaagcattacgacaaacggccgctcaaccatttccgcgatcgaacagctccttgaactgctgaaggagaacgggctgatcgttctcgttgtgtaccacgggcatcctgaaggcaagacggaaaaaagtgcattactggagtactgcagcaatcttgatcaggaaaaagcgcgcgtgctgagctacggctttctcaaccagcgaaacgacccgccgtttattatagcgattgaaaagaaatctgccggcaaataaagaatcggcctgtcataagcgggccgattctttttgtgtttacttttcaagaaaaatcaattactatgaaataatggaaaaaaacacatcttttaagtgtaacatctgggaggagcggcagtttgaatattcttcgcatcatattttcaagtgttccctatgtgatgttcgtcatcattttatcaagacatttaggatttgagttcgcgaaaacctattactggtggtttgctgcattttttgtcatcgggctgatcggcaaattcgcaatgcaccttgcggcaaaaaagaaaccgttaaaaaaagagacagcgtaaaatgcgcattctctttttatttactgttttgcagcacgccgcgtgtataagcgggattgtttgtaaagacaccatctgctttttgtttcagcataataggcgtcagcgtatgctcgtcttccttatcaaaaaacacgtgcactttcatcttattgtgatgaatgcgcttcacgactgcttcatttgccaatttggcgttgagcccgactgtatcagcatacgttctgatggtttgcagctgcttatcatttatctcctcagcctcgttatcttttaataatcgaacaagaggaacttttttatccatagatcgaactttctttaagctcttcccgctaaaagactcaatgactgctttatggctggaaatcagcttatgtttttgtaatatgtcaatcagtttcttttccatcaccaggctgccgttgctttctcttgtctcaatatagtaattggcagtttgtccgaatttctgtatgatttcttctaatgttaaaatcttttctccttttcccgcattcagtttcttaatctgagccaaagacagatcatctgtcatccctttaccatctgttgtccgatctaccgtgttatcgtgaattgcaatcagatggccgtcctttgtctcccgtaagtctatctcaatataatctgctttgtctttaatggcacgcgcataagacaaagctgtatgttccggctcaatcgcagaagagcccctgtgcgctatcaagacaggatgatagccggcggaagcatggatgacggagcagcctccggaaatggaaagtaatgctatgaccgctaaatactttaattttttcataaaattaaagtatcatattctgcaggcgcaaacaatgtttcatttcatacttcacgtcataaataaaaaactgcaccgtcatgatttacacgagaggcgcagttcacccattacgaacttttcgtccaagccatcttctgaaatttgcggtaggctcttccgttgatataaaagaaaaatgacgtttttccgcttgccctgatcagctttcgcgcgaggcggcccatttctttttggccggcgactttgtcatcggataaatagacgccgagcagccccctgttgatcagccgatgaaaattttcatgcggaatgccttgcaaatgttcatccgctttttcaataaaatgctgcagtctctgcatcatttcttcatgagactgataatacgtacagaaattcagatcgccttcaagcagatcctcttcctggtcaattaaataatcaagcagtatatgcagcccttgtatgtacggaaaataactgctgcggattttctcagcggtatgttcgttaaaatcaggctggaatgagtaagcaacgagacagaaaatacctaacgtcgatccggcgcaggccgagaactcaaaccactccatttccggaagctgtgaccggtactgctcaaaccaggctttaagcctcggaacgcgttcatgctcaacgacatgcttatgaacctgaaggtcgcaataataatcacacagctcaagcaaataaggtttaatgataccgtaatgttctattgacccgagcacccgctggcatgttctgaccagctcatgaagataaccgccatcatcccgctcatctctgtactgatagtacggccgcacctcggcaccgaccgtcagcgcgtcacgcatggaaagatgaagcatgcggaagtcctcaggatcaagcgaggtgctgcggtcgcacagattgtccagataatcactgattgtctgatacgcgatgataaattgcacgcatttctgtttctgctctcccgaaagcagggctaaaatgccgcccccttcacaatgaaacgatttatcgcggatacttgcggccgcctgctgccgcagttcggtatttttaatggaatctgatttttcccgccacatgttcaattcctgatgaacgagcggaaaaatttcccgatacacttttgccataaggttaaaaggatgttccggtactgtcaacatatgcacccccagcgaattcaaatatactgatctgtaaaggcttttgccgccttaaacacagtttctctttccggttcattaaaaatttcatgataaagcccttcccattcccggtacgatttattatgggaagcaacaccggaaaaccatttgcggaccttcattttatcgacgattttgtcatctccgccctgcataagcaaaagcggcacctttaaaaacgcatcagtcggcaccatagcggcatcaatggtttttaaaagctctctgtaccatcttacggataccttcgtgacatataaagaatcgttttgatccgcttcaatcatatccgcattcctcgttgccatatcaggtgataagccggaatccactctgagggacggagcgaggacgttcagtcctttagacgcaaaatcaaggactttattgacttttatttgcagacccagacaaggtgatgataaaatgagtgccgtaatgcggggatttctctgctgcttaaaccattctatcgcaatcagtccgcccatgctgtggcccaaaatgaaaacgggcgcttcaagcgttctcgctttatcaatccatatatctacttcatcaatgtattcttggaaagagcgaatatgccctctggcgcgggtcgacgttccctgaccgggcaaatcgcccatcaccacgttatatccggaagatctccacatttcaacgagccatttatagcgcccgtggtattcgctcgccccgtggataatgacaatggtaccgacgggcctgtctgctttccaagtccacatgcagttcacctcttacataaatttagagaaagaaggatgagacatgataatctacccttataaacaatttacgcctgacatacatcctgaagcgttcattgcggataacgccgtcataacgggcgacgtcgtgatcggagaacaatcgagcatttggttctcagccgtcatccggggggatgttgcgccgacaaggatcggaaaaagagtcagcatacaagacttgagctgtctgcatcaaagtccgaaccgcccgcttcttattgaagatgacgtcacgatcggccatcaggttacactgcacagcgcaatcatcagaaagaatgctttaatcggtatgggctccgtcattcttgacggggcggaaatcggagaaggcgcatttatcggcgccggaagtctcgttcctccgggcaaaaccattcctcccggctgtcttgcgttcggccggcccgcaaaggttatccgccggctgacagaagaagacatacgggacatggaaagaatcagaacggaatatgttgaaaaaggccgatactataaaacactgcaagagaaataaaaatagatcagctttgttttactactgtaccatttttcaaaatattatttaagtaataaccatttgcgttccgctgattgtcaggaaacagtagcaaaatgttcaggaatttgttttattcttcccccgccggcccgatcctatgaaaaaaagagcccatgtcccgggctctttttttacgctttttcggcgaatgtctgtccgttttccagatctatgtcttttcttttatggaaacctttcccgtaataggcggctaataatatgccgaaccagacaggaccgatgatgacggccacccgggtctctgcatcaaaagccatcagcacaacgacaaaagccagaaatgccagcgagatatatgaggaaaaggggtataaaggcattttatatttcagttttttccgttgttccggctgtaagcttttacggtatttcatttgggaaagcaaaataatcgaccatgtccaaatcgccccgaacgtcgcaatgctcgtcacccacgtaaacactttcgccggcaccacgtagttcagcaaaacgccgatgcataacgcgcccgctgaaaccaataccgcttttcccggcacaccgccttttgtgaccgtaccgtatgctttaggcgcttcattttgctccgccagattgaacagcatgcgccccgtgctgaagatcccgctgttgcaggaagaaagagccgccgtcaatacgacaaaattaatgattccggctgcagcgggtattccgattttttcaaatgtcaaaacaaacgggcttccgcctgaaccgatttcctgccacggataaattgacataatgacaaacaaagctccgacgtaaaaaatgagaatacgccaaaaaacagtatctatggcccgcgccagtgatttttccggatttttgacctcaccggctgtgacaccgatcagctcaatcccgagataggcaaacatgaccatttgaagcgacagcagcacccctttaatcccattcgggaaaaagccgccgtggctccataaattgctgattccgagcgcaacgcctccatttccgagaccgaatacgatcatcaccagaccgatcgcgatcattgacagaatcgccaagactttgatgagcgcaaaccagaattcaagctcaccgtacgctttgaccgccagaaagttgacagccgtcataatgacgagtgcacaaagcgcccagatccatgacggcacgtcagggaaccagtagcccatataaatgccgaccgcggtgatttccgccatgcaggtaacaacccataaaaaccaataattccagcctgttaaaaacccggcaagcggaccgaggtaatctctggcataccggctgaatgagccggctacaggcttttgaatcgccatttcccctaatgcccgcataataaaaaacataatcagtccgctgcaggcgtaagcggctaaaatccccggcccggcaagctttatggcagaagccgacccgagaaacagcccgactcctatcgcggcgcccaacgacataagcgagatatgccgctcttccaagccgcggtgaagcgttttttctttgttttgcataactctccctccccctgattttgacaaagaaacaacaaaccgagacgaaatagccagaaaacactttccggaatctacccgattagtcctattataacctttttctgaatattgcgtaatactttgtcgaaaacagagcggaatagacggtttacaaaagaacaatagaaaaaaggctttcgataacatcgaaagccttttggattaaacgaaaatgacttctttcggctgatgattcagctcttccggcaccagtcttttttcgacattgatgctgtgccagatcatgaagatcagcacggtccagattttgcggctgttgtccgctctgtcggcacaatgatcttccagaagctgaaggacataatccttttcaatataagcatctgtttcactttcacgaatgatgttgcgaacccattcgttcatttcatttttcagccagtggcggatcggcacagggaagccgagttttttgcggttaagcacatgatcaggcactaccccttcagcagctttgcgcagaaggtatttcgtcgtgccgtttttcgttttcagttcatccggaattttagaagccacgtcaaacacgactttatcaaggaacggcacgcgcagttccaatgagttggccatcgtcattttgtcagcctttaacaggatgtcgccgcgcatccacgtatggatgtcaacatactgcattttattaatgtcgctgtatgaacggctttccgtaaagtacggcttcgtgacatcacggtatgaaagctctggattgtaatgtttgagcagctgttttttcacgggctcttcaaaaatcttcgcattaccgatataacgctcctcaagcggtgtgcagccgcggactaagaggcttttccctctcattccttcaggcatgacggacgccacatgaagaagcatttttttcagaccggacggaatgcgttcaaacggtttaagcgaaagcggttcgcggtaaatattgtatccgccgaacagctcgtccgcgccttccccggataacgcgaccgttacatgttttttcgcttctttcgcgacaaagtacaaaggaatcgccgccggatctgcaagcgggtcatcaaagtgccagacgattttcggaagctcgttcatatactcctcaggagaaatgactttgctgatgttttcaattccgagcgcggcagccgtttccttcgctacgtcaacctcactgaagccctgctgctcaaaaccgacggaaaatgttttaaggctcgggtgaaattctttcgcaactgagacgataaaagaagagtcaataccgccggatagaaacgaaccgacaggcacgtcacttctcatgtggactttgacagagtcaaagattgcgtctctgacttctttcaccaatttatcttcatcagactgaacaggcttgaagttcgctttgaaatatgttttaaacgcgatgtcgccttccggacggatcgtaaactggctgcccggctcgacttttttcacttcagcgtcaagcgtgctcggttcaggaacgaattggaaagacatatattgctgtaaagaagctgtatcaagatcaatgccgttttgagcggccattaaactttttctttcagatgcaaaatatactttgtccccgatggttgtgtaatacagcggtttaatgccgaacgggtctctcgcgccgtacatgacgcggtcagctttgttccagattaaaaacgcaaacattccgcgaagctttgaagcagcttcttctttataatgacggtatgtcgcaaggagcacttcggtatcggaatctgtattgaaagtgtagcctttcgcttcaagctcttctctcaattcaatgtagttatagatttcgccgttaaaaatgatccaatatttttcgtcttcatatgataaaggctgtccgccgttttctacgtcaataatactgagccgtctgaagccgaatccgacgtgctcgtcatgataatacccatcgctgtcaggaccgcggtgaacgatcatttggttcatttgtttgattagctcttcttgatctgcggtttgagttaatggatgcttattaaaaacaccgacaaatccacacatagtatagcctccataagtgtaattttctaattggaccccctttttatagacgctttgttacgccattggtttcacgctatgtaaaaaataagcatggcagcatctacaaaaagggaaagccgcttaagtaagcggctataaaattattctcctagtgcttctttgcgaagcgcatccgccttgtcagtacgctcccaaggaagatccacatcatgacgtccgaagtggccgtaagcagctgtctgcttatagatcgggcggcgcagatcaagcattttaataatgccggcaggtctcaggtcgaagttattccgtacgacttcgatcagtttttcttcagaagcttttcctgtatcaaatgtattgatagaaatagaaacaggctgtgccacgccgattgcgtatgcaagctgcacttcacaagaatcagcaagacctgctgccacgatgtttttcgctacgtatctcgcagcgtatgccgcagaacggtctaccttcgtcgcatccttaccggagaatgcgccgccgccgtggcgtgcatatccgccgtatgtgtcaacgatgattttacggccggtaagacccgcatcaccttgaggtccgccgattacgaaacgtcccgtagggttgatgaagtattttgtctcttcatcgatcagttcctcaggcacgacagggttaatgacatgctctttcagattgcgctgaatctgctcaagcgtaatttccgggtggtgctgagttgaaatgacgatcgcgtcgatgcggaccggcttgttgttttcatcatattcaacggtaacttgcgttttgccgtcagggcgaaggtacggaagaatgtcttctttgcggacttcgctcaaacggcgggctaatttatgcgctaaagagatcggaagcggcataagctctttcgtttcgttacacgcataaccgaacatcaggccttggtctcccgctccgattgcttcgatttcagcatcgctcattgtgccttcacgcgcttcaagagcctgatcgacacccattgcgatatccgcagactgttcatcaattgatgttaaaacagcgcaagtctccgcatcaaatccatatttggcgcgtgtgtagccgatttctttaatcgtttcacggactgttttcggaatgtcaacgtatgttgatgtagtaatctctccgcttaccagcacaagtcctgtcgttacagatgtttcgcaggctacgcgcgcgttcgggtcattttttaaaatctcatctaagatactgtcagaaatttggtcacagattttgtccggatgaccctcagtaacagattcagatgtaaatagtcgacggtttttactcattcacttttcctcctgaaaaaagatcttttgcaagaccttttcatatgatacggaactcgctccctcttaatacaatgtcatactatatcagagaatgttaattggcatattttatgaaataaaaaaaccttttccactcgaggaaagggtttggtctgtgtgcctttcactcttatcgctcaaggaaaatattaaaccttgcatcaggttagcaccttggtttcccacagtgttttcacctgcttttttacagagaaaccggttgctgggcttcatcgggcctgtccctccgccagctcgggataagagtatccgctcaatgaaatatcttatcgtaaaagggcggaaagtgtcaatatgaattaaagcgattacgcgcctttatttcgggaagcaatggaaaaacacaaacaaaaaaccgcaaatagtatagactattttcagatatatgttatactaattccacattcagcgaaatacaaataaaccggcaaaggaaggtttttatgaaattagttgatttaaccgcagatcttcaagcattacttgcaagtccgaatgtgcatcataatttatcggctccaaaacttaccgaaaaagtgatcagccgaaatgaaggaacgctgacatcaacgggcgccgtacgcgccaccaccggcgcatatacaggccggtcacctaaagataaatttatcgtccgtgaacaaagcacagaaaatcaaattgattggggcgcggtgaatcagcccatttctgaagaggcgtttgaaaagctgtacgccaaagtcgtcagctacttaaaacagcgggatgaactgtttgtgtttgaaggattcgcgggagcggatgaaaaatacagactcccgattacggtcgtaaatgaatttgcgtggcacaatttattcgcgcgccagctgtttatcagaccggagacggatgaaagagacacgcaagcgcagcctttcaccattctctcagctccgcattttaaagcagatccggagacggacggcacgcattcggaaacatttatcattgtctctttcgaaaagcgcgtcattttaatcggcggcaccgaatacgccggagaaatgaaaaaatcaatattctccattatgaacttcctgcttccacagcaggatatactgccgatgcactgctcagccaatgtcggtgaaaaaggcgatgtcgccctgtttttcggcctttccggcacagggaaaacgacgctttcagccgatgcggaccgcaaactgatcggcgatgacgagcacggctggtcagattccggcgttttcaacattgaaggcggatgttacgctaaatgtatcaatctgagcgaggaaaaagaaccgcagatttttcgtgcgatccgcttcgggtctgttcttgagaatgtcgtgcttgatgaaaaaacgggtgaagcggattacgacaattccttctacacggaaaacacaagagccgcatatccgattgagatgatcggcaatatcgtgcagccgagcattgccggccatccgcaggcgatcgtctttttaacggcggacgcattcggtgtgctccctccgatcagcaaactgacgaaggaacaggcgatgtatcacttcttaagcgggtacaccagtaaactcgcgggaaccgagcgcggcgtgacatctccgcaaacgactttctcgacgtgcttcggttcaccgttccttccgcttccggcgcatgtatatgccgaaatgctcgggcataaaatcgacgaacacggcgttcaagtcttcctggtcaacacaggctggaccggcggagggtacggagtcggagaacggatgaaactttcgtatacaagagcgatggtcaaggccgctattgaaggcagactgaaccagactgagatgacggcagacagcattttcggcctgcgcagtcccgttcatgttccgggcgttccggatgaagttcttcagcctgaaaacacatggagcgataaacaagcatacaacgaaaaagcgctgtttttggccaatgagtttaaagaaaactttaaaaagttttcccatgcggactcgattgccaaagccggcggacctctcgtgtaatcaaaaaagccaagggcgtttagggactgaccccataatatgagacaaacaaaaaacaccttcaagtttgaaaacggatcgttgttatccgaaattagacttggaggtgttttttctatggggacaagagtgagttatccggttgaagtgaaacagaaggctgtagaaatgagattggcaggcgtacctatgaaagagatcctgcaggagttgaatattaagaataagacacaggttcagacatgggttagatggtataaggctggtgatacacatcgattcgaacagcctgttggaaagcaatacacttacggaaaaggtccggagtattcttccgatttagagaaactgcaggcagagattcgttacctgagacaacagaatgaagtgttaaaaaagtacaacgaattggaaaggaagttgatagcgaaacgtcagtcgaacttgtagaaatattgcacagcacaatgaccgtacaggatatctgtattcatttaggtatctctcgagcgtcttattatcgttggaagaagaatctgatgaaggatcatcccaagcgccatttggaaaaacaaatcggcacgttgtgccgagaacacaagtatcgatatggctatcggaaaatcacagccatattaaaaaagggaatgcgtatgaatcataaaacggttcagcgcattatgcagaagaatcagtggcaatgccgggttaaggtgaaaaagcgcaagaagaatgggcagccatatgccgtggccgagaatatattggatcggaactttcagtctgatcgccctctggaaaagctagtaacggatatcacatatttgccttatgggcagaaacaattgtatctttccagtatattggatttatacaatggagaagtgattgcttttacgattggcgatagacaggacacagattttgtcttacacacacttgatcagctgcccgtactgccagagaactgcgtgttacatagtgaccaaggttctgtttatacatcttatgagtatcagaaagctgttaaaacaaaaggcattaccatgagcatgtcccgcaaagggacacccgctgataatgcctccatcgaatcgtttcattcctcactaaagtctgaaacgttctacctcgacaggttggaaagcactacgacgaccatcgtagagcaaactgtcgaaacctatatatactattataacaacattcgtattcaaacgaaactaaacaaccagccgccggtcacataccgacagctggctgcttaaaggtgttttgatccctgtctcaaaaacgggggtcagtccctttatgccctcggcttttgttttttcagtttgtcgaatggagcgacgtgagtctgtatgtaatgcttgtccggccgttcgcccattcgagcttttggacctcgccggtgccggatttctcgccggttttcgttttgcgcacgtccatcggaatatcaagaggatagacgcggtagccctctttctccaataaaaagatattttcctctatccttttttcattgccttttgtcacaatcatggtattaaattcaacaggcattcccaaaatgaaaatcccctttcattctcttattctttattatcatatcataaatcaggcatcttaccgtgtcttcatccattccgccagccgccggacaatgcgtctgttttcctgcggcggaaaataatgcgtaaaaccgctgtaataccaagtttccaccggtttccccgcctctttcagcttgtcctcgatcattcgggcgtgttcgatcgaaacattctcatcattctctccatggatgagcagcacaggggcctgaatgcggtctgctttttcaaacggcgaacgccatctgtattcatccggcacctttttcggcgtgcccccgatcacccgcttcatcatccgccgcatatccttccgctcttcataagtaagcaccatatcgctcacaccgccccatgatacgagcgaagccgcttgacgccccatttcaatcgcggtcaaaagccccatgataccgccccgggaaaaaccgaaaatatgcacccgcccttccctgacgttcggatgctcccgaagcaggcggaaagcggagaacgcgtcctctctgtcctctcccgcaaaatcttcatttccctcgccgccctggttgcctctgtaataaggcgcaaacacgacaaaaccctgggaagcgaattgaacgattcttccggggcgtaccatgccgacattttttatgccgccgcgcaaatataaaaaaccgtcatatgttcccggcgacgcaggctcggcaaggagcccctttaccttcagcccttctgactcatagcatacctcaaagaggcggatatgcggactcggagacgggaaccttttcttttctaccagcaaaacaatggcctccttatatcatcagtttttttattctttcccaacgtgaatatgggcactcacacattttttatacccatcatacgatatgtaaagcagaaaaggttattttaacgcttaaaacaaggaggttacaccgtgaacaaatggctcaaaacgggctgtgtttttgtcatatgcgcctttttcctgctcattcttccggcttgcagacaggaagaaagtctgacaaaggtaaaggtggcggaagtcacacactccatcttctatacgcctctgtatgtcgctgaagcaaaaggtttctttaaaaaagaagggctccaagtgtcacttcaaacaacatggggcggagacaaaacaatgacatcgcttttgtcaaacgggtctgatatcgcgctggtcggttctgaaacatccatttacgtggaggcgcagggagcaaaagatccggtcatcaacttcgcgcagctgacacagacggacggcacatttctcgtgtcgcggaaggatgagaaatcattcaaatggagcgatttaaaaggaaaaacatttctcggccagcgaaaaggcggcatgccccaaatggccggtgagtacgtcctgaaaaagaatcacatagagccgaaaaaagacattaacctcgttcaaaacattgatttcgccaatatttccaacgcattcgcatccggaacgggtgattatgtgcagctgtttgaaccgacggcatcccaatttgaaaaagaaggcatcggccatatcgtcgcatccttcggagaagcttccggccaaatgccatacacaacctttatggcaaaagaaagttatttgaaaaccaatgaaaagacggcggaaaaattcacccgcgccatctatcgcgcccagcaatgggtggaaagccatccggccaaagacatcgcaaaaacgattcagaaggaatttgccgataccgatccggccattatcgaaacatcaatagagcgatataaaaaacaaaagtcattctctgcagacccagttctgcaaaaggatgaatgggaacagcttcaatctattatggatgaagccggagagctcccgaaacacattccgtacagcaaactcgtcaacacaaaaatcgccaaaaaagtcacctcagaacaataggaggaacatgaatgtcttttttacatgtggatcatgtaacacatacttatttctcgctgaaagaaaagacaaccgccgtgaaagatatacattttcagattgaaaaaggggatttcatctcctttctcggaccgagcggatgcggaaaaacaacactcctgtccattctggccggtcttatcacccctgcgcaaggccgggtgctgattgaaggaagcgtgccgaaccataaagaacaccaaatcggttatatgcttcagcaggattatttatttccttggaaatcaattgaggaaaacgtgctgctcggtttacacatttcaaaaacattaacagaagaaaaaagagctgaagttctcagccttctgcctaagctcggattaatcggcgttgaaaagaaatacccgaaagagctgtcaggcgggatgcggcagcgggcggcacttgccagaactcttgcaccggacccgggactgctgctccttgatgaaccgttttccgcgctggactttcaaacgaagctttctttggaaaaccttgtcttcagaacattaaaggattttcaaaaaaccgccgtgctcgtcacccacgatatcggtgaagccatcgccatgagcgatacgatctatttattttcgaatcagccgggcaccatccaccaaatattcaccgtgcctaaggagctcgcggctttagatccgtttgacgcgcgtcaggatccggcctttcagccgctgtttcaaaccatatggaaggagctgaattcccttgaaaaacagcagcggcacgattgaacagcttcatcagcagtttaagaaaagacaccaaaaagaaaagctccggatccgtgcgtatcaggccgccatttttatcgtattttttgccggatgggaaatatcgagcagggcgggctggatcgatccgttaatcttcagctcaccctccgccgtttgcaggcttttagttgaaaagattgcggacggatcccttgcggcgcacatcggcgtaaccttaggagaaaccgttctcggctttttgctcggcacgctcctcggcacatgcctcgccgctttgttatggtggtcaaacaggctcgcccgggttttagacccgtacctcgtcattttaaacgcgatgccgaaggtcgcactcggaccgattctcatcgtggcactcggaccgaatttcacaagcattgtcgccatgggagcagtcatcagtgtcattatcacgacaatcgtcgtctttacggcttttcaggaagtggatgaaaactatattaaggtgatgaaaaccttcggagcgaaaagaagcatcatgtttaaagaagtcattctgccggcatgcgctcccgcgattatttccgcgcttaaagtgaacgtcggtttatcctgggtcggtgtcatcgtcggcgagtttctcgtttccgaaaaaggtctgggctacatgatcatttacggattccaggtcttcaatttcactcttgtgttcttaagccttctgatcatcgcaatttttgcgacattgatgtatcagggagtcgaactgttagaaagaaaatggacgaaaggaaaaatttaaaaaagacccgtgcgtaaacgccgggtcttcgtttttatgattgaaatacgccgtcctctttcagctttttcagactgatcggaagcaccgaatctttcataatgaaactgaatcttttatttcgcgggagattctccggcagttcgctgaacagcaccggcccctttgtttcaaaatagtcagcctgttgttcaagcttttcaatatcggcaaaataaatattcttcacgattaccttttccctgccgagaactttatactgtccgacgtacttcagatgtcttaccgcggcgccggtttcttctttcacctcgcgcagggccgcttcctccgcacattccatcggctccacttttccgcccggaaattcaaacccccggtcttcgtgctcagtcaaaagccacttatctccatatcggcatatgacccacacgtgcttcgggctgtctgaaaaaggctggtgctcaaaggagagctgaacagtgttctgataatagtctttaaactcgtacatgtttatccctctaatccgttccttcatatcttccatacatcataccacagttgcgtttgttcggaagccctttatcaaaaattcagaggaaaaccatcatacccgctagtatagcctcctttgaagcaaatgttacggtttgcgcttgaatttatttttcaaagtatccaataggtcgacgagcacctgcggaaccggtatgcccagcgagcttgccgtaatcacgatctgaaccgattcgtataagatataaaacatgatagccaaattacggatggcgccttcggtatgaagcagctggtcaaaaaaatggcaaactgagactaatgccagggtcacgatttttttgaccagccgcgcaaaaagctttcttgcgctcagctgctgcaaaagagattcttttaagtttgtactgataaactcaatcgccatgaccgatagcaaaatcagaaacgaatactgaaaacctccgaagaaaaaccccgctgccgacacgatcactgcaaaaaacgaaaagatgccaaagtctttgcccacttgatccaacatcctttcacagaaacggccttacattattctatgaaaagtgaatggaacggactggatttttcagaaaaatggacaacacctctcttcggcagccaaataaaagaccgagtgctttatagccccggtcttcccttgttgattatcccaaatacgctttcagcatccagttatgtttttcgatattctggtgaatggcaagcagcatatcaccggtcgtttcgtctcctacctcatctgcgagatccatgccgcttttcagctcttccgcaatgacagtgaaatcatcataaatgttctgtaccatttgttctgcgctctcattgccttccgcttcttttacagacgctgtcttcaatgattccgtcattgtgccgatcggcttgccgtttaatgccagcagacgttctgccagatcatcaatatatgtagccgtttcgttatacagctcctcgaacttttcatgcaatgtgaaaaagtccttccctttgacgtaccaatgatagttatgtaatttcacatacatgaccgtccagtttgcaacttgcttattgactgcgtccaatagtttttctgacatgcctatcttcctcctttggtttactattgatataccctatatatcgtgtgttaaaacaaaatttttagcccttgattttacggatggaaaatatgttatgatttgttaaaaaggagggatttcatgctgcttcttctgagcttcggctttcttatcgtgctcgccgtgctgcttttatccatctggtcgactgtaagagcttataatgtaaaacatacgattgacccgccggaggacgcatcaaaaggcttgacggataaaaaaaatccttaatgatgatgcgtctgttcctcatggccggaggaatcatcggcagcttcagcacccccgacacgcacttttacagtcggcatattatgctgctgttttgccgttacgtgggattgaacggtatacacaccctcttcatcaaattcagtccgcaggtgatacgcccctttttcctccttggccttgcttgttttgctgctgcctttttttccttctttccatacttcaaacatgacttcatccgcatccgtgacacgcttgccgccgtaaaaaacttccgccttgtattccgctttttcatgcggtgcagtcgtttccggtcctgtaagcttgacctcaagcgctttaggctcttcatccgcggaggttttgtccgaattgcccccgcaggaagataatagaaataccataccgcacatacctgccaatacagcccgtttcatcccatcactcctttatgtttgcttctattttagcaaacgcttacacataaggtgtgacattttttagaaatatgtaaaaaagcctttttgcatgtcagcaaaaaggcctgttttttatccgaacactttcagcaaatcttctttatcttgtgacagccagaaacgcatcaggcgtttcgcgccttctaagtcatgaagtttcgcctggccgcactgtttttcgttggccgccggaatctccgtaatatcgatggcttctttcagcgtagcgtcaagcaggtctacaatttcttccgctgtcggctcgccgctgacaacaagataatagcctgtctggcagcccatcggtgagatatctatgatgtcgaagtgatcgtatttctcagaatgtgtgcgaatcgtaaacgcaagcaagtgctcaagcgtatgaatcgtatccggcttcatcgcctgtttgttcggctggcagaagcgaatgtcaaacttattcacgacgccgtctgttccgactttatgcactccgcaatgtcttacatacggagccacaaccgcattatggtcaagctcaaaactttctactgaaggcataatggcactccctttttttcagaatatgcatccattataacacagttttccgataagaattgtggcggaagcttttcaatctgaaattttttttctatactagcatcagaaaggtggttttttgatgaaaaccataatgattgctttaatccgcggataccagaagttcatctctccgctgacgccgccgtcatgccgcttttatccgacgtgttcgcagtacggaatcgaagccgtcaagactcacggcgcattaaaaggcggatggctgacactgaagcggattttaaagtgccacccttttcatccgggcggtgttgatcccgtaccggacaaaaaagaaaaacattagtccatatgctggtagccgtcgatcaccagatcaagtttaccggtttcaggatcaatcaccagaccgtgcaccggcacattgtcagggaatagcggatggtgtttaatgacgtttacgctgtctgtaacactcgcttctactgaatcaaagcttttcagccattgatcaagatcaactcctgagtgcttcagcatgtcaatccgctctttcggaataccgcggtcgataattttatcgagcatatcctcgctgttgattttgctcatgccgcaatcatggtggccgataacgcagacttcatcggcgtttaattcgtatacggccactaaaaggctgcgcatgatacttccgaacgggtgggcgacaagcgcgccggcacttttaataattttcacatcgccgtttcgcatgttcatcgcatgcggaagcaattctacaagacgtgtgtccatacaggacaaaatcgccatctttttatccgggaatttagatgtttggtatttttcataatctttgtttttagtgaactgctcattaaattgcatgatatcgtttagaagactcatcttggtgtttcctttctgcttttttattcacaatataacataagacgggtcatttcgtcactccccgcacgagatgacaaagtgctcaataaataagacaaaccccattgggcttgtcttatttccccatattgtattttttgttgaactgttcgactctcccgcctttttcgttgaatttttggcggcctgtataaaacggatgggtatctgagctgacttctactttaatcagcgggtatgtctttccgtcttcccactctgccgtttcctctgattttttcgtagaatggcttaaaaagcggtagccgctgttcacatcttgaaaaatcacttgatggttatccggatgtatatcttttttcatgctgatctccctttctcaaatcgtaataattacgttttatcttaaaccttaaatatccgcttgtcaatcatatatgccctgatcccttgatttctaaaccctgcacatatatggaatcggaagaataatctaatcgcttcagcaaataatataaccacattacataaaacggtaatttagaaaggcggtttatgatcgtggatgatttagtattagccagaagtctgttcgggacaaccatgggctttcatattatttttgcgacgcttggtgtcggcttgcctctgatgattttaatggctgaattgatttatcaaaaaacaaaagatccgcattatgccattatggcgaaaaggtggacgaaggcgcaggctgttctgctcggcgtggcgataccgaccggaacgatcgcgggtacacagcttgcccttttgtggcccggattcatggaggtcatcggcagggtgatgtcactcccgtttcagattgaaatttatgctttctttatcgaagcgctgtttatgtccatttatgtctacgccgctgaccggctgactccggcgatgcgcatcattgccgttattttcgttttgatcggcgccgcggcatctgccgtcttaatcacaaatgttcacgcatttgaaggaacgccggccggctttaaacttttaaacggcaaaatcactgacgtcgaaccttgggcagcgttttttaatccaagctttttcaccaccgcgggccatgtcgtactgacggctttcatgaccggtgcatttatcgttgcgtcagttgcggcttataaaatgctgagaacgagaaaacaggagcaggtataccgctttcaccgaaaagcgctgctgctcgccttaacgatcggagggatattctccattattgcctctttaaacggtcacgagtcagcccagcttctttacgaataccagcctgagaagcttgcgggcgcagaagggctctttgaaactagatcacacgctccgcttgcgatcgggggttttactgatgcaaaagaagaaaaagtaaaatgggcgatagaggtgccgtgggctttaagctttttggctgcaaacagctttgataccgtcgtcaaaggattgaacgcgtttccgaaagacgagtggccgcctttattcatccatacactgtttaacggaatggtcggcatcggaatgctcctcattttgtactcaatcatcggcatcgtgtggagaaaaattttaaagaaagacagctttccgacttggcttttgattttatttttaaccgcaggaccgctcagtctgatcggaattgaattcgggtggatattcgcttgtacggggcggcagccatgggtgatttaccatctcctgaaaacgtctgatgtcgtcacgacaaccggttcaatcggtttgctgttcatcctgtttacggtcgtttacgccattttggcagccgcagtcatttatgtgctgctttattatttccgcaaacatcccgttgaggaggatgtaaaagcggcggaatcctaactatagaaagggctgaattaaaatggacattaccatggatgctcttattgcgatatcaatcgtatggggcttcgtgtttatctacgcggtcatggcaacgatggacttcggagccggcttttggtcgatgatttatttaaataaagaacaaacaaaggcgacaaacatcgccaaccgttatttgtccccgacatgggaagtgaccaacgtctttatcgtcgcaatcgttgtcgccctattcagcttctttccaggggcaaccttcgtgctgggaaccgttttattgatcccggggagtattattttgctgcttttagccatccgcagcggctttctcgtcttctccaatacggcgaaggaaagaaaaatcatgagatatatctccggaatttcgggcttcattattcccgctgtgctgattttggtccttccggtcacacacggaggatttattgagaagacgggcggagtgtatcaactgaatttggcaaatgtctttacaagccttaatgcgtatgcgtttatcggctttgccattttaagcactttatttttatcttcactgcttctggccgatttttcaaatgttgcggaagaggagcatgcgtaccgcatctacagacggagttctttactaacagggccgctttcgcttctatttgccttcttcattatgctgacattacgaaacgaagccggctggctgtatacggggatgatgaaagacaagacatggcttatcctgtctgttatcatgtttttcattgccggcgcggccctgtttttgccgaataaacgcttcggccgcaacctcggcaaaccaagaatcgccatgatcgccattgcgcttcaatactttctggcaagctatgcatacggacgggcgcatcttccttatatgatttatcctgatattacggtcatgtcaggatttacggagccggccaccttcagggcgctgtttatgacgtatatcgtcgctttcatcattttgtttcccgggttttatttcttctggaagctctttatgaaagacagacgttatatccgccaggaggaataacaaaaatcagggcggctcatactaatggcgtaccttttatcttggaggggagccagcatggaccaaaaaattctgtgtgaagtcaataactgttcatattggggcagaggaaacaaatgcacggccgacgcgatttatgtggtcagccatacaggcgaaaccgctgaaaaaagtgaagaaacggattgcaaaacctttaaaccgcatgatttataaaagaaaagagctgttttatacagctctttttcatttccgcgccgcaagcctttttgaaatcagcccctgagccggggaaaacagaaaggccagcagaaaaaacacgccggtcatcgcagccatcgcacctgaaattgacacgttgagccatgtggcggccccatatcccaatacggctgacaccccgccgatacccgcgctgatgaaaagcatggaagaaagacggtttgtcagtaaataggcggctgcaggcggtacaatcagcatcgcaacgactaaaaccgctcccactgaatcaaaagaagcaaccgtcgtaagcgacagcatacccatctgcacataatgaatgaccaggacaggaatgccgatggctatcgccatttccgggtcaaaggcggcgattttaaattctttatagcagcagacaatcagcagcacattgatgatgagcacagataaaatcatccaaaacgctttagggccgatatcgaagccgaacagctgagctgtattccacggaacgaaagcaatttctcccataagcgaatgttctatatcaagatgtacatgtttgccgtatacagacagcagaatgacgccgaccgcaaacaatgacgtaaagacgacaccgatagccgcgtcagactgaacgcctttactgtgcagaaactgtacgaaaaaagccgtcagcagcccagatgccgcagctccgataaacatcggaattccgttaagggctcccgtcacaaggaaagcgccgacaattccgagcagcaccgtgtggctgatcgcgtcagcaagcatcgccatgtttctcagcacaagaaaagtgccgattaacgcgcagctcaccccgactaagattcccgttgcgataatccacgcttcataactcattgtaagcgcctcctttctccttttgaagtgattggttcggcattcgcccgtgcaatcgtaaaagctgcaaaagcttttctttcagttctttcggcagaagatccggatgaaactcgtccctggcggccgtttctataccggccagttctgtttcatgcatgaggtaaacttcatacatgcgctgtgataagacaatttcgtatcccttcgtcagccctgcgtccgtcatccgccattgttcggctccgctgcgcttgaggtatccctttttctccagtttcctgatagggcgctcccactcttttttcaacatctgcccggtgactgaggtttcattcgtttgttcgctcatctcgtaaatagctgagagcgtttgttcaaaagcggtcttttttctcagccggaaaagtttaaccgtctttgacaccagcccgcggcccggagcgaataatagagaaaacagaaaaacggaagccgcgcttaaaataattaacggcccggtcgccataccgtccgtcgtcgtacttaaaagtgttcccgccacaccggataacccgccgattaatccggacagcacgatcatgaccgttaaacgctccgtccaataccttgcggcgatcgccggcgtaataagcatggccgccattaagatgacaccgaccgtctgcagcccgatcacaaccgcacaaacaattaaaaaaaccagcagtccgttcagaaacctgacaggcagtcccgcccctttcgcaaatgccatatcaaatgtgatcaatttaaattccttaaaaaagacggcgcacaacaaaagcagcacggcagaaatgactccgatgatgacaatgtcctgtttaacgagtgacgccgcctgaccgaataaaaaagaatcaagcccgctttggcttccggaaccgagtctttgaatataggtcagaagaataatgccgatcccgaaaaacacggacaatacgatgccgatcgcagaatcctccttcgtttttgagtgctccgtgatgttctggatgcaccaagtccccgcaagccccgcggcagccgctccgatcaagaagaacagcatcgtcttttctccggcaatgagaaacgcaagacatactccgggcaaagccgaatgagccatggcgtcgccgatcagactctgcctcctgagaagcacaaagcttcccaacacgccgcttgccatgccgagaagcaaagttcccgccaacacccattgggtattcggttcctgaagctgaagccatatatgatgcagcgccatcagcccgttcccccttcggccaggaggtgatctttcaaaaatgccagccttcctccgtacgttttttgtaaattttcgattgtaaacacgtgttcagtcggtccgaaagcaatctttctcatgttcagcagcagcatccaatcaaaatactcctttgccgtctgcaggtcatgatggacgacgagcacggtttttcctttttgttttaattccgtcaacagcgtgataatcgcccgctccgtagcggcgtcaactcccacaaacggttcatccataaagtatatatccgcatcctgacataaagcccgggccagaaaaacccgctgctgctggcctcctgaaagctggctgatctgccttttggcatattcaagcataccgaccttatccaaacaggtttcagcaaaatcaatatcacgttttttcggacgcctgcaccagccgatatgcccatatcttcccattaaaacgacatccagagcgcttgtcggaaaatcccaatccacagaaccgcgctgcggaacatagccgatcctcttccgctccttttctgatgatttcccataaatagagaccgttccggaggcgcttggcgttaatcctaaaacagcttttatcaacgttgattttccggctccgttcggcccgataatcccgatcagttttccttccggcacctgcatggtgacgttctgcaggaccggttttttgtgataggctaccgtcacattttcaatgctgacaggatacacgtcattctctcccttcctgtttattttaatgagctgacaatcgtatctatgttatgggcgaacataccggcgtacgtgccctcttttgtccccttttcgcccatggcatctgaatacagccagccgccgaccgaaacatcatgacctttttctttggcgccctcaacaaccgcgtttattgactttttcgatacgctgctttccgtaaacacagctttaatttccttatccgcaagcagactgacaagtttttgaacatctttcagtccgtaatcagagtccgtgctcagcccttgaagtcctctgacctcaaatccgtattccttgccaaaatacgcaaaggcatcatgtgccgtaactagtacacggcttttttcgggaattgtcccgattttttctctcgattttttatctaaagatttcaaattctctttatactcttgagcgtttttggtaaagtcgtctgcatattcgggttttgctttttttaattgcgcttcgatttcgtcaacggcatacagccataacggaatgctgaaccatacatgcggatcatacatattctcacccgctggaatcaatttctccttcggtattgattcaaccactgctgcggacggcttttgcctgctgattttcgttaacatatgctccattttcccctctaagtgaagtccgctgtataaaacaacatccgcctccgttaattttttcgtatctccttgtgatgctttataaagatgcggatcgactccaggccccatcagtgacgtcacttcaacatggtctccgccgatatgttcagcggcgtcagccacctgagaagtggtagccgtaatcgtgagctttcctttttgtccgcctgaagattcagagctgcatgaagacaatgcaaaacaaaccatcagcacagacgccattacactgctttttttcatatccgtcccctttcctttgtcccgttctcttttaaatgtgatgttgatgtcagtcttatgacaattctttatatttaagaacaaatgattgatacaggacaaaaagtttcctctgtgcaaaattatcgcacacactcacatttgtcaagtgtccgctcattaaaaaaaccggctgatacagccggttcaaacgggggaaggggtgatgatgaacagtttcaatataacagcagcatacaggcagctcaactcgctgaaatgtctttttatcagttgtttgtcgtaaaaacgtccatttgggtgacgtattttctcattatttcctgattgacttcgacacccagcccggggccgtccggaacagagatgaatccctcttcgatacgtatgtcgggagtgacaatatcctcctcccagtatcggtctgatgaggaaatatcacccggtatcgtaaattgcggcagcgaagcaagcgcgattgtctgcgctcttgaaatgccggtttcaaacattccgccgcaccaaaccggcatgtgatgctctctgcataagtcatgtatttttaaagcctctgtcaggcctcctatacgcgccggttttatgttaatgattttacagctcccaagctcaatcgcccgccttgcgtcatcatatgagcatatgctttcatcaaggcataccgcggttcttaaatgtttctgcaggtggcggtgatcgacaatatcatctgcctgaagcggctgttctatcatcatgagctggaattcatccaactctttcagcctgctgatgtctttcagttcatatgccgagttggcatccgccatcagcggtacgttcggaaaacggctgcggatggatctgaccagatcaacgtcatggccgggctgaatttttatttttatacgttgataaccttcttttacgtattgctcaatttcccgaagcatctcatcagccgaagccagacccaccgccacgccggcgggcactttatctcttttgccccctaaggcttctgcgagagatatcccctttttcttggcatatagatcccacacggctgattcaagccccgcttttgccatgcggtttcctttgaaacgcgcgagactgtcaggcacttctgacggatggaaaaactcgcggcctacgacatttgggatgaaaaaatctctcagcatatgcgcgcatgtctgaatcgtttcttctgtataccacggagaagaaaacgccgatacctccccccagccggttctcccggtttcatcgatcgcttccacgatcaaaaatttacgatcctgcagcgtttcaatacttgttttaaacggttttttcagcctcatacttacatgataaagggtgattttttcaatcttaatcatgacaattctcctttacgaagctcattcagccgatgcctcatcagtttattggacgcgttccgcgggagcccgtcaaccttgaaaaaagcagccggtattttatatttagcaagccgctcacggcaaaaggcggtcagctcctcagaactgacagaagaagtcagtacgagaaaagcatgcggcactttcccccatttcggatcttcggctcccgaaacaccggcctccgctacagccggatgggcaagcagcgccgcttccacttctgccgggtagatgttttctccgcctgaaataatgaggtccgaccgcctgtccagcacgtataaaaacccttcatcatccaaatagccaagatcgcccgttttaaaccatccattatgaaaagcggcctggttcgcgtcgtcacgatgataataccctttcattacattcgggcctttcaccgtaatttcaccgtgttcaaacggcgcacaagggtttccgtctttttcaattctaatttcgcatgaaaacagcggtttaccggccgagccgagcttgtccatgctgaattccggagaaagcgtgacaatctgtgagcaggtttcagtcaagccgtaagattggaataccggaaattgtttcctgcggcattcttcaaggagcggcagcggtgccggacccccgccaagcagaatgcagcgcagtgattcaggacattgttcagtttccgcaagcaggcccgaaagcatggtctgcaccgctgaaatgatcgtgacctgatgggagctgatgctgtccagcacatcagtgacagaaaatttttgatgaagcacgacaggcataccgtaaatgaccgacttaaacagcgcagacagaccgctgatatgaaatagcggcagcgcaataagccagcggtcccgctccgtgacccccagattcagcgcagacgatacagcgctggaataatgattaccgaaagtctgctgcacccccttcggccttcccgttgttcctgacgtatacataagagtcgccgtatcatcaagcgttacataagcttcaggttcaatgtctcccgcggctttggcctgcagctcgtccacgtccgcggcggcgaccgcagattcatattcttcacggcaaaaaccgtcctccgtcaataaaagcttagcctgtgaatctttgagctgaaacatccgttcctgtttcgagagcttcgtattcaacagcacagcttccgcccctaataagaagcaggcgtgaacggcataaaccatttccggtctgttagaaagcaaaatcgcggcccggtctccttttttaagcgagcagtatttggacagccgcgcggccatttgtttagaagcatgatataattctctgaatgtcatctgtttgttttcaaatatgagagcaattctctctggtgtcagctgagccctttgaatgagccaattcggctgttctgtcagcatgttatcatctccgaggtaaaagtactgtttttgaaaagaaaacagcttggaccagagcggctcaagctgtttcgtagtgtcatctgatcacggaaaacgagggaattgaccgaaatcgggactgcgtttctctttaaaggaatcgcggccttctttcgcttcgtcagtcgtgtaataaagaagcgttgcatctcctgcaaattgctgaattccggcgaggccgtctgtatcagcgttaaatgccgctttaaggaaacgaagggctgtagggcttttctcaagcatttcttcacaccatttaattgtttcctcttcaagtttctctaatgggacaactgtattgacaagccccatgtcgagcgcttcctgcgcgttgtattgacggcacaggtaccagatttcacgggctttcttatgtccgacgatacgcgccaggtaacctgagccgtaaccggcatcaaagcttcccactttcggtccggtttgaccgaaaatcgcgttatcggccgcaatcgttaaatcacagacgatatgaagcacatggcctccgccgatggcatagcctgataccattgctacgaccggtttaggaataacacggatcaaacgctgaagatcaagcacattcagacgcgggatctgatcgtctccgacatatccgccgtgaccgcggactttttggtctccgcctgaacagaatgctttatctcccgctcccgctagaacgatgacaccaatattggagtcatcacgcgcacgagcaaacgcgtcaatcatttctgataccgtcttaggagtaaatgcgttatgtacctccgggcggttaattgttatttttgcaataccgttatacgtctcgtacaggatttcatcgtactgacgttcacttttccattctgcagccattgatatgacctccttcatttttgcctgagtccggccgaaaagctattttctttatgctttataagccgtataaaaactcacttactatcttaccaaaaattcgcggctgttccacatgtaccgtgtgccccgcctttttgacaacctctattttacttgatgggagcaggttatgcaccttttgattaataacgcaaaacttttcatcccattctccgcatatgagcagaacgggcgctttgatgcggtgtaatgcctcccaccaggaaggctgtgagcccgtccccattccgagcaggctgcctgcaagtccggacggattatttttcagcctgccggcacggatggacgcctttatgctgtccggcagagaaagctgcgtggcaaacaacggaatgccctcccaataatcgacaaacgatgttataccttcctgcaatataaagtcagcaagcttccggtctgactgaatccgctttttgcgttcctgaagcgtgctgaggcccggagttgtactttccaagacaagcgctgacacccgatgcggaaatgcctgtgcaaaggaatacgcaagtcttccccccatagaataaccaataagtttcactttgtgaagttttaattggtcaaaaacggcggcaaggtccgcaacctgccggctcgcactgtaccttgccgcttgcacaggcgcgtctgtctccccgtgacccaggcagtcaatcatcaccattcgttcgccgggaaacatgccgcgtaaaaacatccatgattctttgctgcccgtaaatccatgcagacaaacaatagcttcagatgattcgtgtccgctatcagcagcacgatagcatacgccgtcggccgttttaactgttacagtttccattcttttttcacttcccgcactgcggcctgcagcagatcgcgatggaattgaactcttgatgtccgatctgttttcagctcgattatatgaagtccgggcttgtccgcttgcggctgatacgcatccttaaatgcctcccatgtctcagggcaagtatacgtcccgccgtacagtgcggcggcatgctggaaatcaaggcccgtcggcgtaccgaacagttcttcaaaatgagtcttatcagatgcctgcggcaaaaacgagaaaatcccgccgccatcattgtttattaaaataaccgtaagcggaatgccaagttttttagccgctaacagcccgtttaaatcatggtaaaacgataaatctccaatgacaagcgtgacaggagcttttgtaccttcacacagtcccatagccgaggagacaactccgtcaattccgttagcgccgcggttggcataaacacggaaggagcgatcttgtttttcaaagaacgtatccacgtcgcgaatcggcatgctgtttccgacaaaaatcgaactgccttcagggacaaggtgctgaagctgacgatatacatttccttcaaaagataaatcatccatgctcgcggcctgtaaatgactccggaaccggtcattgacaaattgccatttctcaagccatccggacggccgttttccggtttcagctgaacgaaccgcttccaaaaacacagatggatggcaatgaatcatatgcgcgccggcgtgggtgggatctctccatcctccgtcttcatcgacgataaactgctcaatggcaggatcatctctgagccataaaaagagcggtttggaaaccggcatcggaccgaagcggatcacagcgtccgggcgcagcacctcttttatttcttcatcttttaaaaacgagtcataagcatcaataatcagcgtcttatcatgctccccgtttcggaggtttgaaagcggatcagccaaaatcgggaactgaagcatctcggcaagcgcgatgatttgctgcttttctgcttcaccgtgaatttcgccgcagacgatcatacctctttcggtacccgcaagacgctctgtaatatgatagagagagtcttgagcagctgactgaatccctgttgtgactgagacgtgccgcccctttctcattctttcaaaaggtccggctgataaatccggcatcaaaggctctctgagcggcacattgatatggactggccccatcgggcgcttcccggcttcacttacggctctgccggccaatgttctgatataactcagcatttgaggattttcctcaggcagagccgagtctgtgaaaaacttaacaaagttaccgaacagaaaatgctggttaatcgcctgaggcgcccccacttccctcaattcatgaggccggtcagcagtcaggacaataagaggcactcttgaataatgagcttcaatcacggccggatagaagttagccgccgccgttcctgacgtacaaatcagcatgaccggacgctggcgggcttttgcaagaccgagtgcgaaaaaacctgcggatcgttcatcaatctgtatatggacttgaatatccgggtgggccgccgccaaaaccgccaagggagttgacctcgaccccgggcaaacaactgcgtcggtgacacccgatagagcgaattcatcaataaaacttccgatataatgtgtaatcgggtttgtcaaagcctttcacctcctaaagcagagatcatcggctttagtttaatttgtgtttcttcatattctgattgcggatctgaatcttcaacaatgccgcagcctgcgaaaagccgcgcacttttgccttcaatcagccctgatcggatagccacgacaaattctccgttttccctgccgtccatccagccgatcggtgccgcgtaccatccgcgtgtcatcggttcaatatcagcgataacttcaacagctttctgctggggagctccgcccaatgccggtgtgggatgcagcttttcaattaaatcaaacagggaagcggacgttttaagatggcctgtgatcggcgtatatagatgctgaacacttttcgttttatataattgcggacctgcaggctttttcacatcgctgcagctcgacaagaaagaatcgtgtatcatctgaaccacaaaatcatgttccgcgagatttttttcgtcatgcagcagctctttgccgagacggttatcttcttgttgattttctccgcgcttaattgaacctgccagacaggtggacatgacgtctttgccggattttttgatcagccgttccggtgaagcgccgacaaagcatttatctccctgctcaatcgcaaaaacatagcttgtcgtttggtccttcaaaagcttgcggacaacgctctccgccggaataggcccatcatatgacaaaacgacttcccttgccagcacgactttatcatattgatttgctttcatatcatttgttgctgttttaatggcttcaagccagttttccacatcaagttcttccgcttttgttaaaacaggatattcttcatactcgattgaagaaactgaaaaagcttccgaaaaagatttcagacgtttcagcgtatcttctgcctgattaccgtctgccgcccattgattgacggttaaataatcaccatctgccgtctttgtcagcatgagtgaggggataaagaacagtccttcttcgaacccgttccattcgtctcctctctcttcagcgggattaaatgaaaaaccgccgaataagacagggccgaccgcggtatgcgccgcctcttcttctttatgaatatgaaaagccgtctttttaaagcgctcccattgttcaaaaacgtcgtgataacgctttccatttttttcattcgattggaacagcgcttctgtgccaagaccgactattgttaattcactaccgggttctgaccaaaaaaatcgtttgcctttatatttttttgctccgtctttgaaaaatgatagagggtctaaagacgcaatacgtcttgaatagctcaataagacagcatggttgacttgtttggctttatgtaatgcatgatctgcttcctctcggaacgtatgctgcaccgttgtcaccatgagacattcctccataatccgttaaatgcttttaatacaatacacctgtgatgactttgtgtcaaacacacagatttgagcacgacaaaatgcccgcatttcttattataaacctttttgcgcaaatgaataaagaaacaaactcgaattttctttccccactctcggcaatcactgtatccttttacttcctcatgggaaaatgactatttttatccaccatttttctgcgcaaaagcgttcatactaacagtaagtatcacatagaaacgagggattaatgtgcttacaaacgaacagatcacacacttaaaaaaagaattggaagaagccagacatgatattttgagccgctttaaagaaaatgacgaatttcagttaactgatgaattcccgtatcagtcatccggcgaattgtcttcctatgacaatcatcccggcgatcaggcgaccgaattatatgagcgggaaaaagacctggctctgctcgaccatgaacgagagcaccttcgcgacattgattactctctgaaacaaattgaaaacggcacatacggcacatgtgaagtcagcggcaaggacattccttatgacagactcgaagctctgccgacggctacgacattggcggaatattcctcgcaggatgccgtttccaaagacaggccgattgaggaggaaacaccgttcggacagtttgaatttgatgatgatgaatcaatccgggcggcttacgatagtgaagatgcttatcaggatgttgaggaatacggaaactcagaaacgcctcaggatttagaggatcctccgctcagctatggggatatgacaatgaactcggaagaaaacatcggctatgctgaggattatgaaaactttatcgcgacagatattaccggaaaaaacatttccgtgtacccaagcaaagcacacgaaaaatatgaacaggaactggacgaagaaggaattatgacgacattcggcgatcttcatgctgattaaaaccccggcctgccggggtttttgaatacaaataaatggtttgctgcatttccacactgaaaactcatacacttaatggtgcatgaaccttttaagaggtttaatatttccaaaaagaactaacgtattgacattgaatgacggagggaacaaatgaaaaagaagtatatcggtgcgattattgtatttatcattacatatgtcttgttttctttagcgggggttctctttcccatcgaccgtgaatggtatgacgcgctgcaaaaacctgactggacgccgagcggatcagtgatcggcatcatatgggcggttttgtttgcgcttatttcgctctcagcagccatgatatacgcaaagttttcatgtaaagaatccaaagctttttgggtgatgcttctcatcaattatatcgtgaatcaaggattcagctattttcaattcacacagaaaaatttgcttgctgcatctatcgattgcctgcttgtggctgtgacaacactcattctgttgctcattgccggtaaatacagtaaagcttcagcctggcttctggttccttatttattatggagcgcttttgccacatacttgtcttttaccatttatgctatgaacgcataataaaaaaccttgcatagtatgcaaggttttttaatgacccgtacgggattcgaacccgtgttaccgccgtgaaagggcggtgtcttaaccgcttgaccaacgggccttatggcggagaaggagggatttgaaccctcgcgccgcttacacgacctacacccttagcaggggcgcctcttcagccacttgagtacttctccgtatggctccacaggcaggattcgaacctgcgaccgatcggttaacagccgatagctctaccactgagctactgtggaaaaatcatcatggtgggcctgagtggactcgaaccaccgacctcacgcttatcaggcgtgcgctctaaccagctgagctacaggcccatgacaatataaaaatggagcgggtgatgggaatcgaacccacgacatcagcttggaaggctgaggttttaccactaaactacacccgcatgttgtatggggcgattgatgggaatcgaacccacgagtgccagagccacaatctggtgcgttaaccacttcgccacaaccgccaaaacaatattaaattaaatggtggctcgggacggaatcgaaccgccgacacacggattttcagtccgttgctctaccaactgagctaccgagcctttttataaatggcggtccggacgggactcgaacccgcgacctcctgcgtgacaggcaggcattctaaccaactgaactaccggaccatttttttggttgcgggggcaggatttgaacctgcgaccttcgggttatgagcccgacgagctaccgaactgctccaccccgcgatgataattaaattatatatggcggaggaagagggattcgaacccccgcgggctttgacacccctgtcggttttcaagaccgatcccttcagccagacttgggtattcctccgtataagtggtggaccttgtaggactcgaacctacgaccggacggttatgagccgtctgctctaaccaactgagctaaaggtccaatggtagcggcggaggggatcgaacccccgacctcacgggtatgaaccgtacgctctagccagctgagctacaccgccaaaaaacaattaaaatcaagtggagcctagcgggatcgaaccgctgacctcctgcgtgcaaagcaggcgctctcccagctgagctaaggccccaaaatggtcgggaagacaggattcgaacctgcgaccccatggtcccaaaccatgtgctctaccaagctgagctacttcccgtttttcaaaagtatgtatggcgcgcccgagaggagtcgaacccctaaccttttgatccgtagtcaaacgctctatccaattgagctacgggcgcaacaataagtgccgagggccggacttgaaccggcacggtagtcacctaccgcaggattttaagtcctgtgtgtctgccaattccaccaccccggcatggatggtatagtatagttggagcggaagacgggattcgaacccgcgacccccaccttggcaaggtgatgttctaccactgaactacttccgcgtttggcaatgcggatgaagggacttgaacccccacgtctgtaaagacactagagcctgattctagcgcgtctgccaattccgccacatccgcaagaaaaacatggtgagccatgaaggactcgaaccttcgaccctctgattaaaagtcagatgctctaccaactgagctaatggctcttattacaagagacttatatagtataacatataaaggtggtgccggcaagaggacttgaacccccaacctactgattacaagtcagttgctctaccaattgagctacaccggcttaatacgccaacttatgtatgataggaatggtggaggatgacgggctcgaaccgccgaccctctgcttgtaaggcagatgctctcccagctgagctaatcctccgtatattacacttgcgtgtaatggcttggcggcgtcctactctcacagggggaaacccccgactaccatcggcgctgaagagcttaacttccgtgttcggcatgggaacgggtgtgacctcttcgctatcgccaccaaaccattgagagtgttctctcaaaactagataacagtaagcatacattcaaattggttaagtcctcgatcgattagtatctgtcagctccatgtgtcgccacacttccacctcagacctatcaacctgatcatctttcagggatcttacttccttgcggaatgggaaatctcatcttgaggggggcttcatgcttagatgctttcagcacttatcccgtccgcacatagctacccagcgatgcccttggcagaacaactggtacaccagcggtgcgtccatcccggtcctctcgtactaaggacagctcctctcaaatttcctgcgcccgcgacggatagggaccgaactgtctcacgacgttctgaacccagctcgcgtaccgctttaatgggcgaacagcccaacccttgggaccgactacagccccaggatgcgatgagccgacatcgaggtgccaaacctccccgtcgatgtggactcttgggggagataagcctgttatccccggggtagcttttatccgttgagcgatggcccttccatgcggaaccaccggatcactaagcccgactttcgtccctgctcgacttgtaggtctcgcagtcaagctcccttgtgcctttacactctgcgaatgatttccaaccattctgagggaacctttgggcgcctccgttaccttttaggaggcgaccgccccagtcaaactgcccacctgacactgtctccccgcccgataagggcggcgggttagaaggtcaatacagccagggtagtatcccaccgatgcctccaccgaagctggcgctccggtttccaaggctcctacctatcctgtacaagctgtaccaacattcaatatcaggctgcagtaaagctccacggggtctttccgtcctgtcgcgggtaacctgcatcttcacaggtactataatttcaccgagtctctcgttgagacagtgcccagatcgttgcgcctttcgtgcgggtcggaacttacccgacaaggaatttcgctaccttaggaccgttatagttacggccgccgtttactggggcttcaattcgcaccttcgcttacgctaagcgctcctcttaaccttccagcaccgggcaggcgtcagcccctatacttcgccttacggcttcgcagagacctgtgtttttgctaaacagtcgcctgggcctattcactgcggctctctcgggcttgcaccctaacagagcaccccttctcccgaagttacggggtcattttgccgagttccttaacgagagttctctcgatcaccttaggattctctcctcgcctacctgtgtcggtttgcggtacgggcacctctcacctcgctagaggcttttcttggcagtgtggaatcaggaacttcgctactataattcgctcgccatcacagctcagccttcacgggaaacggatttgcctatttcccagcctaactgcttggacgcggatatccaataccgcgcttaccctatcctcctgcgtccccccattgctcaaatggtgaggaggtggtacaggaatatcaacctgttatccatcgcctacgcctttcggcctcggcttaggtcccgactaaccctgagcggacgagccttcctcaggaaaccttaggcattcggtggaggggattctcacccctctttcgctactcataccggcattctcacttctaagcgctccacaagtccttccggtcttgcttcacagcccttagaacgctctcctaccactgttcgaagaacagtccgcagcttcggtgatacgtttagccccggtacattttcggcgcagagtcactcgaccagtgagctattacgcactctttaaatggtggctgcttctaagccaacatcctggttgtctaagcaactccacatccttttccacttaacgtatactttgggaccttagctggcggtctgggctgtttccctttcgactacggatcttatcactcgcagtctgactcccaaggataagtcatcggcattcggagtttgactgaattcggtaacccggtaggggcccctagtccaatcagtgctctacctccgagactcttaccttgaggctagccctaaagctatttcggagagaaccagctatctccaggttcgattggcatttcacccctacccacacctcatccccgcacttttcaacgtgcgtgggttcgggcctccattcagtgttacctgaacttcaccctggacatgggtagatcacctggtttcgggtctacgaccacgtactcaattcgccctattcagactcgctttcgctgcggctccgcatcttctgcttaaccttgcacgggatcgtaactcgccggttcattctacaaaaggcacgccatcacccgttaacgggctctgactacttgtaggcacacggtttcaggatctctttcactccccttccggggtgcttttcacctttccctcacggtactggttcactatcggtcactagggagtatttagccttgggagatggtcctcccggattccgacggaatttcacgtgttccgccgtactcaggatccactcaggagagaacgaagttttgactacagggctgttacctcctatggcgggcctttccagacctcttcatctacctcgttcctttgtaactccgtacagagtgtcctacaaccccaagaggcaagcctcttggtttgggctggtcccgtttcgctcgccgctactcagggaatcgcatttgctttctcttcctccgggtacttagatgtttcagttccccgggtctgccttctcatatcctatgtattcagatatggataccactccattacgagtggtgggtttccccattcggaaatctccggatcaaagcttgcttacagctccccgaagcatatcggtgttcgtcccgtccttcatcggctcctagtgccaaggcatccaccgtgcgccctttctaacttaaccgttaaaaagaatcactacgtgatatcttgcattactaattgaatgtgaattacttctgttatctagttttcaaagaacaacgcataggacatgctaacacatgcgttgccacaggaagtggcgcatttagcaggtgttcctatgttttgaaggaatgatccttcaaaactaaacaagacagggaacgttctgtttataagacccaaggtcttatattccgttaaaatccttagaaaggaggtgatccagccgcaccttccgatacggctaccttgttacgacttcaccccaatcatctgtcccaccttcggcggctggctccataaaggttacctcaccgacttcgggtgttacaaactctcgtggtgtgacgggcggtgtgtacaaggcccgggaacgtattcaccgcggcatgctgatccgcgattactagcgattccagcttcacgcagtcgagttgcagactgcgatccgaactgagaacagatttgtgggattggcttaacctcgcggtttcgctgccctttgttctgtccattgtagcacgtgtgtagcccaggtcataaggggcatgatgatttgacgtcatccccaccttcctccggtttgtcaccggcagtcaccttagagtgcccaactgaatgctggcaactaagatcaagggttgcgctcgttgcgggacttaacccaacatctcacgacacgagctgacgacaaccatgcaccacctgtcactctgcccccgaaggggacgtcctatctctaggattgtcagaggatgtcaagacctggtaaggttcttcgcgttgcttcgaattaaaccacatgctccaccgcttgtgcgggcccccgtcaattcctttgagtttcagtcttgcgaccgtactccccaggcggagtgcttaatgcgttagctgcagcactaaggggcggaaaccccctaacacttagcactcatcgtttacggcgtggactaccagggtatctaatcctgttcgctccccacgctttcgctcctcagcgtcagttacagaccagagagtcgccttcgccactggtgttcctccacatctctacgcatttcaccgctacacgtggaattccactctcctcttctgcactcaagttccccagtttccaatgaccctccccggttgagccgggggctttcacatcagacttaagaaaccgcctgcgagccctttacgcccaataattccggacaacgcttgccacctacgtattaccgcggctgctggcacgtagttagccgtggctttctggttaggtaccgtcaaggtgccgccctatttgaacggcacttgttcttccctaacaacagagctttacgatccgaaaaccttcatcactcacgcggcgttgctccgtcagactttcgtccattgcggaagattccctactgctgcctcccgtaggagtctgggccgtgtctcagtcccagtgtggccgatcaccctctcaggtcggctacgcatcgtcgccttggtgagccgttacctcaccaactagctaatgcgccgcgggtccatctgtaagtggtagccgaagccaccttttatgtctgaaccatgcggttcagacaaccatccggtattagccccggtttcccggagttatcccagtcttacaggcaggttacccacgtgttactcacccgtccgccgctaacatcagggagcaagctcccatctgtccgctcgacttgcatgtattaggcacgccgccagcgttcgtcctgagccaggatcaaactctccgataaagtagtttgactgactacgcacatcgctgtgcgatttgtttaaaactttgaattaacaggtacgttttgtcttgtttagttttcaaagatcattaccacttgttgaagcagctttattatcttaccactcagcttcttttatgtcaacaacttttttcaagttgtttccgaagcttttcgttgttgtctgctgttcatcagcgacgtttaataatataacacccttttgaaaatatgacaatagtttttttaaaaaaatcattaattattttctttcatacttatttcagtttctcttctatagaaaggcaagccgtcttgtggtttggcatattttcttgtatagtaagattgaactaaatacttgatgaccacaaggggagcattaaagctgagagtgaacgttttgttctgaccctttgaacctgttagttaacgctggcgtagggatgtggcaaagccaaatgatttgcagtttatgcaagcagcgcgcggaccttttcccatccttccccgcgctgcttttttgtttatccttgttacggttgtctgaccagggggaaaactatgaatcattcaacacggcttgtgcgcttaattgaaatagcgattatgaccggggcggctgtcattctggacattgtctcaggtatgtttctccggatgccccaaggcggttcggtctctattatgatgattccgatttttttgatttcattccgctggggagtgaaagccgggcttacgacaggctttttgacagggattgtccagatcgccatcggcaatttgtttttgcagcacccggtccagctatttcttgattacatcgcggcctttgcagttctcggtttcagcggcttgtttgcttccggtgtacgggaatcggcattgaataaaaaaagaggcgctttaacgatgtatgttataggcggtgttttcatcggcagtgtgctgcgctatgcggcacatgtggtctccggagctgtctttttcggaagctatgctccgaagggcacgccggtatggatttattcgtccgtctataacgcgacttatatgattccttcttttatcctttcggccattgtccttatcttattattcatgactgcgccgcggcttcttgaagctaagcggacgaactgaaacagcaggcggtttacgcctgctgtttttttattccgggctgtgccgttcgtttgaatcactcagttcttttgtaagttcatttatactttgttttatgtttcctttgcctgaaaaattctcaataagctcttttacattgattccggaagatgcttttaagctttcctgaagaccggccattaaattggttgcgtagcctgtgactttattggccccgccattttcaccgcttcctcccgtatcaacgacggttattttatcaatgttggaaagaggcgctgagacttgcttcgcatattcaggcagcattttcacaatcatatcaaggattgcagcctgcccgtatttttcgaatgcttcggcgattttttctttagcttccgcttctgcgagacctttcaggcggatgacttccgcttcggtttctcctctcgccttttcagcctccgctttagcaagaccgtcaattctcacgcgttccgcttccgccttggccatcgcttcgatactgtactgctcggcatccgcttccgcgagctgcttcgcttttgcggcttcggccgcttgttccaccgagtaacggtcggcatcggcttttttcttcacttcagagtcatattggcgctcacggcgcagaatttctttttcctccaattcaatctgcttttgccgctcaataattttaatttgcatttcctgctctgtcacctgctggcgggcttttgctgtttcaagatcatatgcctggtcggcattggcttttgctgtatcctgctctcttctgtattccgccattttcagctgattgattttttccgcttcagctatttccgtcgcccgctccagctctgatttttttgcgtctttatcagcggccgcgcgtttaatcctcgtctctttatccgcttctgccgtggcaatgtccgcatcccgcttgacttgggcgattctcggcttacctaatgattcaagatagccgtttttatcgcggacgtctttaatcgtaaaagaaacgatcacgagccccattttagcaagatcctgagacgcgacccgctggacttcctgagaaaacttttccctgtttttataaatctcttcaacggtcatggagccgaggatggagcgcagatggccttccagcacctcccgcgcctcctgctcacggtcttccttagatttccccaaaaattgttcagctgctgttgcgatttcactgatagagcctccgattttaataatggcggttccgtcggccattaccggcacgccttgctctgtatagacttcgggtgtagagacatcaagtttgcttgacagtaaactgagaggttctgcctgctggaataccgggagcacgaacgttcccccgccccggacgattttcagacgatttccgccttcatcaatgtggacgttcttatttcccaaataacttccggtcacgataagggcttcgtccggccccgccgtccggtacttcgtaataaatacagcaataagtgcgatgagtaaaaagaatacgattccgataacgatgataatcggcatagtcataacagttcccccttagatatcagattggttcatgcggcgtcacaaaaagcactccgtctttcacgtcaatcactaatacggcagttccgtacttgatctgttcttgatcaaagctgacggctgatttagaaatggcgccccctattccctctatgatcacttctccatagccgtctttcgggacggaagtaatgaccctgccgactctgccctttaaatccgtctcccgataagcgagcgattcttccgctgatgaaagcgggacaaggacgaagaagtgaagcaggctgaccaaaagaaccgaaagaacaaatgaaagcaacgcaatgacagaacttgatagcggagcggcgatttcgccgatataacctgaggctgaaaagattgttaaaaaagacagaatcaatgcagggtttaaaaatgaaacaggaatggcttccgagaggccgtgaaacacatcttgaaaaaacagaatcaaaagcgtgagacttcccgaaataatcaatgtgtaaagatagaccgtttcaagcggcagatgaaatatgtccatcttctatcctcctttcggccgaggtgtcggagtgttactttatatacggatgtaaaggtaaatggtttcaattttctgataaggaaggctgattacatgattatccaatccggatatgatatgtttactctaaaggaggagataggatgagcatttttaatgaagccagacagcagatctgggaagaactgaaaggactctctgatgaggaattcaaccgaaagcccgcggctgatgagtggagcgtgcgggaagtccttgaccatttaaagaaaattgacgaaacagcgcagacccttttatcaaagcaggcaaaagacgcaccgttaaaagaaatagaagaaaaaccgatggagtttatagaggacagaacagataaacggccggcgccgtcacacctcgaacctgagcaaaaccgaatatcagtcattgaagcaaaacaagaattagatacggcaagacagcagctgaccgcagttatttcatcattaaacgaggaagacttagaacgtgtgcttccgcatcctgtttttcaagaactgacgatccgccagtggattgattttatcggccatcatgaaaagcgtcacattaatcaaataaaagaaatcaaacaaaaaatcgaaaaggtctgagtcagaccttctcgatttttttcttggcgcgtttcggttcataagaatggatggtgaccgcatcgcccgtgcatatgtcacccgggcgttcaacaatacagacaattcctcttctgcccatcgcgtgcctcacaaacgccgcggcgagttttggctgatccggataaaaggattgaatgacttctcccggctgaatgcacggatcattttctccctcgcacaacagagacgcaccgctcggaaatatcattctgcttccttccttaagcggcgtcagtgcagaaaaaccgctgattgcgatattagcgccgagccattcgggaaagatatgagaaatccccatcttctccgcaatgtcatcacattcctccatggacacgattgaaatctgtctccggttaaaaatttctgttcctctttcatacatcggctcacgcgcgccggccttttttgtcagtccgaaatgcaggtcaccgggaaacccgccgtattccgcacgaagcttgtccatctttttggtaacaaattgttcggtatccgctatatatacgccttccgtctttgctgttatgcgtttccacatcagccgccaccgcctttttcttgacattatccttaaaaaaccccgctctgtaaaggagcagggttcatttattataccgttttcggcgttaagtcaaagcagcgtttgtaaatccagttgtatgctttctcattcaaatctcttggatttccgaaagtttgcggatctttcatggcttcttttgataaacgttcaatcatgtccggagacacaccttgttcttctaaactcggcacctctaaatcttttacaagatcatacatccagttgacggacgcttttgccgcttcttcggttgtcatgttgcttgtatcgattccgaatgctttggcgatgcgggcgaatttttccggatagcctttccagttgtattccattaccggccccatcatagctgcgacgcattgtccgtgagcgacagggatgatgccgccgagcgtctggctcatcgcatgcgccgcgcctgctgattcactgccgtatgaaaggccggcaagcatcgccgcctgcgccatgccgtatcttgcttccaaatcctctccgtccgcaaacgcgcgcttaatataatgcgccgcatattcaatggccattaaagcgacggcatcagtgatcggctgcgcgaatttcatcgtatagcactcgatggcgtgcgcaagtgcgtcaatacctgtcatggccgtcacatgcggaggcatggacgtgtgcagctcagggtcaatgaccgttaaatgcgcggcgataagcggtccgcccgtattgaatttaaattctctttcttcatctgtaatgaccgcccattgtgtgacctctgaacctgttcccgcagtcgtcgggatcgttgtcagcggaggaatacggttttccagcggctttttgccttccgcggcttcataatcaagcacgcttccttcgtgtgtcgcttctaccccgatcgctttcgctgtatccatggagcttccgccgccaacagccacaaggccgttgcagttttcttttttatacagttctgatccttcgtttacaagacgtacaggcgggttcggctccactttgttaaacaggacgacttcgatgcccgcttcctgcaaagattcaatgaccgggtttgccactcccgcgttataaattcccgggtctgttacgagcagcgcttttgtgacgccaagcgctctgacttcacttcccgcgtgctgaatcgcaccgattccgtgtttaatgactgtcgggatttcgaatgtatggaatttatgcatgctttctactttcatatttaatgtcatattgtatctcctcctcgttatgcttgaaaccagttcacagccgctggtttcgtgttgcggtaaatatgtttgatttccgtgtattcttccagaccgattttgccgagttcgcggccgaagcccgattgtttgtacccgccccatggcgcttgcgcgaaatacgggtggaaatcattgatccataccgttcccatccgcagtttggcggctacgcgttcgcatttttcaatatcctttgaccataccgctccggccagcccgtaaatggtatcgttggcaagtctgatcacttcttcttcagaagaaaatgactcaactgttaaaacggggccgaagatctcctcttggactatccgcatatcagacttgcagtttgagaaaatagtaggttcatagaagaaaccgttttgaagggcgggatcatcaggacgtttgccgcctgtttccagttttgccccttcttcgatgccgatttctacgtatttttcgactttggcccgatgctcggcggaaatcagcggaccgctttccgtatcttcatgaaaaccgtttcctaatttgatgcgtttcgtgcgcttgatcagctcggctaaaaattcatcatgaatggcttcgtccaccaaaagacgggaccctgccgaacatacttggccggcatggaaaaacacggcgttcagcgcttgatctgcagctgtttcgagatctgcatcttggaatacgatattcggatttttgccgccaagctccagagcaatctttttcacattgccgcttgccgcctgcatgatttttttgcctgtttcaattccgcccgtaaaagagaccaaatcgacgtcgaggtttctcgccagctcgtcgccgacagaggcgcccggccccagcacgagattggcgacccccttcggaataccggcttcttctattaattgaaagactttaatggttgtcagcggagtaatctcgctcggctttaaaacgatcgtgtttccggccgcaagagcgggagcgattttccagctcgcctgaaggagcggatagttccacggcgtaatttgtccgcatacgccaatgggctctctgacgattttacttacggaatcgggaatcggagatgaaatgacctcgcctccgtctttatccgccaaaccggcataatattgaaatacatttgcgatatcatccatatcggctttactttcttcaatcgtttttcctgtatcgagcgattccagctcagctaattcgttcagatcgcgtctgattaattccgcaattttcagaacaaattgtccgcgctcgagcccggaaagcaccggccactccccttcatcaaatgcttttctggctgcggcgatggctttcaccgcatcatcccggtctccttcgcataccgttgcaatttcttcttgattaaatggattaatgatacggcgggtctgttttttttctgcactgatccattcgccgccgatataaagcgttttgctcataagagtcctccttaccgaaaagtaagtttgttaaataaaaatttaatgtttttaacaatattaatttaacatatgtttttttgcctgtcaaaacccggtcagtccgtttagattttgacattttgtcatgattcgttaagattaagaacataaagaaatgacttaacaaatttaaacttcaagaggaaaagagggacagtatggatgagaatccagaattcgcagctatagaacaagccagggatcttgtcattgattccattgcagagacgatggatctttacggaatcacccggagtgtcgggattttatacggaacaatgtatatgagggatgaaatgacgcttgacgaaatgcgcgaggaactgcagatgagcaaaccgagtatgagcacaggcgtcaaaaagctgcaggatttaaatgtggtcaaaaaaacctttcaccgcggcacacggaagcatacgtttgtagcggaaaaagatttctttacgtttttcacgaatttcttcccgccgaaatgggatcgtgaagttcaggtgaatttgtccgccatcgaacaggcccaggcggatttgcagtccgttttgctggccgaggaaggcaacgcggaattacaggaagaagcgcggcagttatatgatcagcttgaaagttcgaaagcttattatcattggctgaagcgtctcgctgactcggttcagagcggggagatttttaaatttattccgatagaaacggacgaaaaaaacgcctgaatcaaaatcaggcgttttttgtcgtgatttgattatttttgagaaaatataggaacataaccccatttacttccattaaaattgatggtaaatttttataggtatggtcgttcttttttaagaacaaccagcaaattttttttagggggatttatgaaaatgaaacacaagtttttctcaactgtcatggcaagtttattcggcctggttttgcttctttctctgccgacagcgtcattcgccgctgagtcaggctcaaccgttcacgagccggaaatgtccacgaaagcgactgctaccttatttgcaaaatatacaggtgccagccagcaggaatggtcattttctgatatcgaattgacgtaccgtccgaacacgatcctgagcttaggcgttatggaatttacccttcctagcggatttgcggctacaacaaaagatacagtcaacggacacgctttgcgtgaaagacagattctgaataacggcaaaacagtcagacttccgttaaacattgatttgctcggcgcagcggaatttaagctttctcttaataataaaacattgcctgctgcaggtacatataagttccgtgcagaaaataaatcattaagcatcggctctaaattctatgctgaggacacaattgttgttcaaaaacgcagcacaccgccgacacagccttgcaactgcaaataattgcgaaaaacggaccggcacaagcccatcgcttgtcagccggtcttttttcgtgctgttttctttcttccggccctcgcattgacaaacccttgaaacaggagtacattcttgtttgttgtatttggagtgacgaaaacagtttcttaaggagttatgaggattgggaaaaatcaaaaataaacaatttgccgtcatcggactcggacgtttcggcggaagcatctgtaaagagctttttaaaatggggcatgaggtgcttgcggtcgatatcagcgaagagcgggtcaacgcatactcctcttatgccacgcatgctgtgcgggcaaattcaacggaagaaagcgagcttcagtcgctcggcatcagaaattttgaatatgtcatcgtagcaatcggcgccaacattcaggcaagcacgctgacgacgctgttattgaaggagctgaacatccctaatatttgggtgaaagcacaaaactattatcatcacaaagtgcttgaaaagatcggtgctgatcgtattatccatcccgaaaaggatatgggcgtgcggattgcgcaaagcctttcggatgaaaacgtcttaaattatattgatttgtcagatgaatacagcatcgtggagctttcagccacgaaaaagctgcatttaaaatccattcttgagctcggcgtccgggccagattcggctgcagcattctcgccgtgaaacataacggcgacattcagctgtccccttctccggagactgtcattcatgaatgtgactgccttgtgctgatggggcataaacgtgatattaaaaggtttgaaactgaaggaatgtaaaaaagccggcgggctgccggctttttttgatgcttatgtttcttcacttaactggacggcggtttggtcaacccagccgatcagctcatctttcacttgaatttggtaccagacggattctccgttttgtttttcagatacgactttaatatgctggccggtaaacttttgcgccgatgccagtttaatagaatgccgctcttttgacggcttggaccacacgtcttcaatggcgtggtctttgatggcgcctttcatatcaactgctttaagagaggcattgattttgtcatattcattcaggttataggtttctatgacatctttaattttttcagcatagccggggtctgtggcgtagccggatttttgaagggcagccgccgctgttttataattgtccgcttcaatgacaggcttatacttctttttattccaagacgttccgttgacaaataatttggcatggtcatccattgattcaaaaaacgtgctgtatttacggaattttgcccgaatcgtttttcgttttcctttttcaaattcatccgttttcatcgtgacgtgttttcctttataatcaccttttacaccgaacaggttgcgcgctttccccgcaagctcactgttcccccagtccgattcgagaatggcctgtgcgagggtgatgctcggaaggacatgatatttctcatataaaatctgagcatgcccggaaaggctgtcaataaagacctgctgctcgtccacctcttcaggcggtttttcttccgtcactatgaatttcgaaaacaccattgataccagaaataatccgaatataagagatacagcaaaaaggcacccaagcccccttttggtctttgctttctttttcatatcaaccttcctttaattccggaatcactagatttataattttactggtcattgatgaaaatttcaataaaatagggaaaaagacggagaaagaacatattgcgcaaataaaaaagactcctctttgaggagtctttttggttatgccatgctcagctgagggccgaacaattcatattgaacggaatcagagtcaaacccgagggcaagaatcatatctttcatttgcgtcataaactgcgctgatccgcacaagtaacattcagcatcttgattcagatgaagctgctccaagaaggtttgatcaatcctgccgctgtaaaaaggcttgtctcctgagcggtcttgttctgccggttcactgtatacataaataatgttaatattcggatgattctccgcagcttgttcagcctctttgcggaacgcggcgtactctccgtttttcgcggcatgaataaaagtaacggaacgctccggctgtttttcggcggctgttttcagcatgctcatcatcggcgtgattccggagccggcactgataagaacaaccggtttttcggcagaagacagcttgaaatccccggcgggtgcactgacttcaagtttatctccctcttgaacttcattgtggagatgagaagaaaccgctccgtcctttttcacagaaatccgatatgcccctttttgagaagcatcagacaggctgtactggcgaatgtgcgtataaggagaatccgcaatccgcactttaatgctgatatattgtcccgcttcaaatccaggaagcgaagagccgtcactcggtttgatataaaatgatgtaatatctttgctttctttcgttttctgtataaccgtaaattctttatacccctgccatccggcttcattgtacatgtctttttcaatgccgatgaaagcctccgcaataacaccgtaagctttttcccatgcctgcataatctcaggagttgcggcatcctgcagcacatccttaattgccagaagcagatactttccgacaatcggataatgttccggttttacaccgatgcttgtgtgtttatggccgatctgtctgaccgccggaatgatttgttctaattgatcaatattcgccgcagccgcaatgactgcatttgccaatgctgcgcgctgagtctgtttcttttggttcgtttggttaaacatatttaacagttcgggatgatcttgaaacatcaggttataaaagcgtccggtgatgttttctccatgtgttttcaatacgggtactgtgcttttgatgatgtctattgttctctcatccagcatgttaatcctcaacccttctaaagatgtattttcaatatatctttatagtaagagatatttcgaataaaagatatattgaaaatgaatctttaaaaaagtcgtcacaatattgtgttggatttggaatttatggatttcacctcctttttttatcacccggtgaaacagggacacatatatttgggaatatacgtttaaagatgaaagcgggggagtgcatggtttccgatatcgattacacgtctccgaatacacagttcacttatgatgtgaatgagagccgtttttttacgaaagatgctcggaactttatcaatgtattggggattaaacagttaaacacgcttgaaaatatttcattattagatatctttctgagcaaaacaaatgtgattgaaccgcatacccatcaaaacgccgctgaattggtgtactgtatttcgggttccgcggtggtgtcgatgctgaatccgttcacccagaaaatacggaattatccgatctcttcaggacaagtggcgaatgttccgcaggggtggtggcattatgaagtcgccacttcagacaaaacccaccttttggccatatttgacgccccttcgcctgaagtgatatacggctcggatattctccgtctgacgccgcctgagatcatggcgcatacgtactgtctgaatgagcatgagtgggaaaaagccgtttcaccgatccggcaatcaactgtgataggccccgataaatactgcggacagactgaaaacacggggattcatgatatgaatacgccttatcagccaaatacgcattatccgaatgatccgtatcggcattatgatacgccgttatattggggatattaaacggagagccagagcggcattgacagaaagagcccctcattgaagaggggctcttgatcattacggtccggttccgcagcttactttgtactcgccttcggacgatttttttgaataacatacgtgcggcgtctgtccggtatcatctttccaattgaaccaatttacataataaaggttcccggcctctccgccgccttcttcttttcgaagaatcgcaaagtagctttgatacggatatccttttttataaatgtcatgcctgatggctcctttttctgaagcagacgtgaagacgacgggagaaagagccgggagcgctgttaaaagaagtgccagtgccgctgaaagagttagtagaagatagattttctttttcattttctctctttcctttattttgagttgttagaaatgaagcagaacatagaggctgccgcagaagatgaaaaaacaaaaaaacccttatttatagaataagggtttaaaggtatggagccaagggggctcgaacccctgacctctacgctgccggtgtggagatgagttcctgatacgaacagacgttttatttcaaaccctaatcttttatttggctaaaaatgaataagttggtccccaaattggataataaattaaaggttaattttccactagacctgccatcaaaacgcccatcacaatcaataataatagtaaaagtaaacaaagtgctaggataacaaaagaaatgttctttgcaattcctttaggcgatttgattgctagaatactccccacgacaattcctaggattccaagcgcccaatgaatatgaggcagaaagcacaatgcgaataaaaggatgataagcgacactattccaaaatactttctcatttctctcctttctattttccctccattaaatttgaaaattgagcttatcaattcttatatattcttaagatctaaaaatatagagtgccatatttttttaatattagcatagatttatcgttcgagctttaagacgacgaatacatacgcgaggttatctgcgcagttcataagggggatacatggcttattatatttgattctcttttatccgttgatacttatgaagttgggagatgatcaaatgactgatttcgaatgaaaagtgtaccggattatctttaacatgatccaattcggaaaaaacccctccttggatgaattgaagagaaaaaccggcaaggatgaacgcgctatccgggaagcagtgaagaacctcatgaggcagcgtatgctgaaatgggataagaataaaaacaagtggatgttttgaaacaatataatgaagaaaggaaaaaagccttttccgaagaaaaggcgtaagctgatcaagtctggaaacgatctgaggcagtttgaaaggtatcatgtgtttgtttttccactgtgttcacacccacttcgcatataaaagataacgacagacccaaaataatgaaaatgctttttttaaaattcatacaggcactctccttcttaggtttgattacgatcagacgaaacttgataagatccatcaaatgaaacagccgatgttgctagaccgatccctgacattaaaacgacagccgacacaatgataaatacgccttttctaaaattcatacaggcattctcccctctgaatttgtttttgcgtttgaatcattttttgatgataaaaataagatttgtcatattgctttgactctgcataaacagcagccgtatcaagagcaatatcttctacatacgaatagtttttatttttctcaaggtaatcaattgtttttttgattcccatttggtctattgcattaatatataaagcctccaaatatttttgcagagattcaaacagcttatctccttgaaatatcgctgatgaaagtccctttttgctgatttgaatcgcctcgcttgttttcccttgtttaaatagaagctttgcgtatgtaaacaaggaatgcggaaggttacccaatttatacttttcagatatctccgctgctttttttaagtagatttcagctttattgtattcttctaagtctccgtaattctttcctatgttgtaataagcagaactgagcagcctttcattattgtttacttgtttcgacaactctaaagctttttctaaatgcggcaagcttttttcataacgtttaaagtctacatagttccctgatacgacaaatagacattgaattttccggaccttatacaactcatactgatcgtaaatatcgagcgcttgctttacgtgatgcatggagacgtggctttgtttcataccgtaatatgcttcagccagtttaaaatgaaactccgctctctcaatttcatcatgcacatgaacgagttgtttttcagcctctctataaaagccgatcgcctttacatactgcttttgatcaaattcatacatgccgcggaaaaataaagaataatagcacagcaggccggaaattcctttatttgatgcttcgattttttccagcagctcgtcaattgtcggtctcacgcgggtagtcaccggttctaaataatccagcataagctgatggcggaatttcatgagggtgtagtaaatcagtagatactcgtcttcttccatctcatttatttcttgttccacttccgctttcaaaatctccgcatccggaacactgaactgacgtatcattttgtaccattcattgatcttaacgccaacctctgatgatggtaaaacagaactcacaaggccactcctccttttatataatattctaacatttccaaattatgtttgaacgaaaaaaaaccgcaatttgtttgcggtctaccagattacttattttcacgtaactgttggaaacgaccatcccatttgcgataataaaactaatgtatggggaatataattgggagggattaaggatgtgtcattttaaaatgcgccttactttatcactcaaatgtttaaaactctatgaaaatgtttactttgggatagtgtttataagtagactctctacaagtctactttatttttttctcataaataaacgaggtgaaaatcaatggatggtataaaatttttagaagatatgacacgactcggagtaatcattttggtgttctccggatatgctgtttattggaaattaggtaaaacaaaaagagagcgagggcttacaaaatttgaagcttgtcttaggttctctgtgatgtttggtatattagcttgggggatttcgactcttgctttgagtttatggtcataatcctttttgtcaatattcgatctatagtctaaacagattaaaatcagataaatgtacccgcaattttccaaaatagggggttataatatggcgtttatacagtgcaatgattgggcggttttcggcatggtgaaggacttgcctttcaatcgcatttggatgtggattgggaaagaggcggcttctatgtaaatcgatcaatttctaaaacggtcaacgggcagcctcttgtaaaaccacctaggctctccttatagaagccgctgaaaatataagcgccattcagaaacgcgccgatcatgcaagccgaagacatgtaaccggaaaaccttggaaatgagacagctcaatattttgatcaattcaatcctaatttgaaggcgaaaagcaactaaacttcctcaaaataaatttttcgtccccaaattgtccccaattgctttttgggactattggccctgttcctgacaaacaaaaaaacccttatagaataagggtttaaaggtatggagccaagggggctcgaacccctgacctctacgctgccagcgtagcgctctcccagctgagctatggccccgtgctgtaacgtcatgttttattatagacgagtcttctatgaatttcaagcagaaaattcagtttgctcatattttcctgagacgtttttcgaacataaaaagaagaccctccggggggcctcttcgtttatcgcacgagcatgattaaaatgatgccgaggatgacacggtaaatggcgaacgggacaagcttaatccggttaataagccgaagaaaaaatttgacgactaagagggcgacgataaaggcgcaaataaagccgacaagaaaaaacggaatcatgtcataagaaagactgctccagtatttcaccagcttcagaaggcttgcgcccgccataatcggaatagccataataaatgtgaagtctgcggctgcccggtgattcaagccgacaatgacacctccggcaatcgttgagcctgagcgggaaaatccgggccataaggcgagacactggaataatccgacacagaaagcctgtttgtaggtgattctgtccaccgtatcgatcgtttctttccttttattgatccagtccgctataagcataagcacggctccggcaattaatccgtaagcgaccgttctgacggagaataaatagcggtcaatgaaatcctcaaataaaaagccgagcaccgccgccggaacaagaccgacggcgatttgcgcgatggtcagcctgtatcccttctgctgatcgcgcgtgacgttttttttgaggccgagtaaatgtaatatccgatccttaaacacaatggccaccgccagaatcgaaccgagctgaatcaccactttgaaggaattggcggcttccggattcatcaggcttccggatttcagccagatgtcatccgctatgatcatatgtcccgtggaagaaaccggcgcatactccgtcagcccttccacgattcccaaaacggctgctgtgaacatctcccatagtgtcatcccattcttcccttcattcatcatttacaaaagagaagctctcctctgaaggaaagcctgtcttataataaatatcatatccgttccgattttatgacttcgatccagcatcatttttttcttcttcatataaatgcgaacgcattttgaaccaatcaaacagatgggtcgtgaccactttgatgaccgcataccccgggatggctaaaataatgccgacaaccccgaacagctttccggcggttaaaagaacaaagatgatggtaatcgggtgaatgtgaagatttttccccatgatctgcggcgaaattaatttcccttccacgagctggacaacggtccatacaatcgcaagcttcagcagcataaggggcgaagtgaccaacgcgataataatcgccggcgtgatggcaatggtcggccctaaatacggaacaacgctcgtacaagcggcaatgaccgcaagcagtgacgcataatcaagtccgataatcagatagccgataaataataaaaacccgatgcagaagctgacgatgacctgtcctctgatataggaacttaatctgtggttcatttcactaagcatcgtatacgtttgttctttcagacgggtgggcacaaactttaagatataaatcggcagttttttgccgtctttcagcaaatagaacagaataaacggcacggtcacaattgaaataatcacttcggtcagcgcgccgataaaattcccgactccggtaaatgtgctgtttgcaattgtcgccgcctgcgccgatactttattagcaagatcggaaatgttgatattcatcgtcttttgcgcctgatttacaaaatcgcttccgatcaggcttttcgtctgatcttcaacgatatccacatatttcggcagattgtcgatcaggctcatgatctgttcctttaaaaacggaataattgaaacgaccgtaatcgtaatcagccctataataatgaggtaaaggagcaggatggaatagactcttttcactcttattttttccaatatatctacgatcggattaagcagataataaacaattcctgtcaaaatgacggggagcgcaatcgttttgagcaggacgataataggtgtgaaaataaatgatgtcttcataaagacaaggatattgagaccgatgagcagcaatacaagcaaaaacaagacaaatttattgtctaagaaaaactgtttaaatctgccgccccatgtttgcaatgtttccactattgttcctccatcatatgtattttacttaaattgtacactatcgttcctgtaatgaaaaataataaccggtctctatgggaatttttcctatccctttagctggcagccttttttccatttatgtttctcagaaaaaaagctataatgtaagccaatacatagaaggagcgatagcaatgattcgatttgcaacagtcggaacgaattggattacagaacgatttctggaggcggcttctgctattgatgattttcaattaacggcggtttattccagaactgaggaacgcgcggcggaattcgccggcaaacacggcgctgctcattctttcaccagcctgaaagaaatggcggaaagcaaagcctatgacgcggtgtatctcgccagcccgaatgcatttcacaaagagcaggcggtcctttttatggaacacggcaagcatgtactgtgcgaaaaaccgtttgcgtctaacgcaagggaaacggatgaaatgattcacgcagccaaaacgaacggcgttctcttgatggaagccatgaaaacaacgttcctgccgaacttcagcatgcttcaaaaccacttacataaaatcggacccgtcaggagattcacggcaagctactgccaatattcatcacgatatgatgcatataagaacggtacggtgctaaacgcgtttaagcctgaattatcgaacggttcgttaatggacatcggcgtgtactgcatttatccggcagtcgtcctgttcggcaaaccgaaaaacgtcattgcgaccggtcataaactagcatccggcgttgacggcgaaggcacggtcattctgtcatacgacggatttgaagcggtgctgatgcattcgaaaatctcaaattcgtttgccccggcggagattcagggtgaagacggcacgatcgttctggacagcattcacggaccggaacgggcggaaatccgctatcgtgacggccggacggaagacatttcagtccctgatctgaaaccatcgatgtactacgaaacggctgaattcatcaatcttcttcgaaacggacagcgggagtcttccgaaaatacatttgaacgttctttcattacggcaagcattatggaagaagcgagaaaacaaatcggaattgtctttcccgccgatcaaaactaaaaacatccgcccggattcgggcggatgttttttatttggacgctaacaggtcagcaaacgcttttgcatactgcggaaggtcgggcgggcggcggcttgatacaatgtgtccgtcagttacgacagcttcatccagccactgtgcccctgcatttgtcatgtcgtctttgataccgggcgtgctcgttactttttttcctgcgagaattccggcagatatgagcacccagcccgcatggcagatctggccgatcggctttttctgctcgttcatcgtacggatgatgtccaaaacttcgggatatcttcgcagtttgtcaggagcccagccgccaggcacgagcacggcatcatactcctggataatcaggctcttaaaatcgtaatccgccgtcgcgggcacgccgtattttcctttgtatgaacggcccgcttcttctcctattaaatgaacgatcgcgccttcctctctcagccggtagacgggataccaaagctctaagtcttcaaaatcgtcactgacaagcgctatgacttttttaccttctaatctcatcactgccactcccttcttttatattagtgtatcgcttttttcagatgaggaaaagaaacagctcgctacagctgttcttcgtcttcagactgaatcgtaaatttccgtgtgacctgctgcagttcttcagccatatgcgcaagcgtttcggcggatgaactgatttcttccatggaggccagctgctcttcagctgaggcggctatgtcttgaatgccggcggacccttctttggcgactgaggtaatgtcctccaccgcgtttgtcacattttgcgacccggctgcaagcttctcaagcgttccgttcatatgctgcaaggcgcctgaaatctgagtcgtcatttctgagatttttttgaagctttcggccgtttgatccgtaatatcgaggccttccttcacatcttgattcaccgcttggaatacggaaagcgatgtggcgatttctttgacgatttcctgaatcagcgtttcgatttccttcgcggagccggctgattgtacggcaagctttctcacttcttccgcaacgacggagaagccccgcccgtattcgcctgctctggctgcttcaatggcagcgtttaaggcaagcagatttgtttgatcggcaatgccgttaatgacgttgagaatgctcttaatgtcgtgcgacttcgtttccagcccttttacgaccgcttccgcctgctgtacggaacgatcaattgttttcatctggcctaccgttttcgccactaattcttctccgcttccggccgtttcagaggtttggatggcggattcagtgatttccgccgatacattcgccgtctcggcaatgccggcattcatttgggaaagatgatcagcactttctcccaatttctcgctttgtgattcgtttccgtttgagaattgttcaatcgccagtgtaatatgctctgtcgccttgcttgtctgtccggcggatgccgtcagctcttcggatgaagaagcgacatgttcgacggatgattggatgacgccgatgacagaccggagtgatgccgacatctcattgaagctttggctgagctgcccgaattcattttttgacttgatgtcaatgacttccgttaaatcgccgtcactgattttagctgatgttgaaacaagttttttgagcggttttgcaatcgagcgaatgataaaaaagattaaaataccgccgacgataagagaaaccgccaggatgatcagcgccattttcatgacaggcgaggctgcgtcatggatctcactgacaaaaaatgtgccggcgattttccagcccgtcattttgtttgtcgtgaaggccattttcttctgctgtccttcaaacatgtattcaaacgatccgcttgatttggaaaatacttctttcatccactctccggagccctccgttcccgcttttatagtcggatgggcgatgtattttttatctcccgttgtaatgaaggcaaatcctttatgaccgatctgcacacgttcggaagcgttcagcaggtcgcccagattaatatcaagcgccacaacgcctgatccgtcttttgtctgctgggcaatcgtaacgaccgtctgtccggttgcagcgtctttataaggctcggtaaacaccggctgtccgcttttttcaaccgcttttgtgtaccactcgcgcgtgagcggattataatcggacggcatatcaacggacggatatttcacgaacgctttgtcgcgagacgcggcgtaaattgacgcgacatcgtcatttacggtgacatactgcttcatattgtcgagcagtaccgatttattttttgtgttcagtttttccttagtgattgattcgctgtagtagtcaatcgctttcagcttgccttcgagcatgttttccagcacgctgttcagttcgctgacatttccctgggcgctgtgggtcagttcgctttctaatgtactccccgccgtttggtagctgaagtaggcgagtatgccgaccggaagcaccaatacggctaaaaatgccgcgatcagcggcttgctgatggatggctgtttgatccaatgtatcagttgtttcattttttcagtctccttctttgaaaagctaaatctaatatcgtcagataggacaaaagatttattaaaaaaactaaaaaaaacacccaaacagcacatttgggtgttctatgacctattaatctattttaaatcgtttcgtcatatcacgtaattcttccgccatttgggataacgtttccgaagacgaactgatttcttccattgaagccagctgttcttcggcggaggccgcaatatcctgaatgctggcggagctttcttttgcgatggacgcgatttgctcagaagctcctgaaatctgctgagagcctgctgtcagctgttctaccgtcgcattcatattttgaatttctccggcgatctggttcgtcatttcagaaatccgtttgaagctcgtttcggtctgattcgtaatatccagtccgctctccacctctttgttgacggattggaacatgccgagagatgtattgatttcgttgacgatttctatgattaagctttcgatttctttcgctgaatcggcagactggaccgcaagttttctgacctcttcggcgacgactgagaagccccgcccgtattcacccgcacgtgcggcttcaattgccgcgttcagcgcaagaaggtttgtctggtcagcgattccgttaatgacacggagaatgtttgtaatgtcttttgattttgtttcaagtccgcgcaccacttgttcagcttctttcactgaccggtcaatgacgttcatttggccgaccgtctggtggacgagctttccgcctgaattggcgacttccgctgatgtggcggaggattcggtaatgacggcagatgctttcgccatatctttaagcccgctgttcatttggtaaatatgttccgccgcgctttcaatgttttcactttggctttcatttccgttagaaaattgttcgatcgccagtgtgatatgttcggttgccttgcttgtctgctccgctgaagccgtcagctcctctgaggaagatgcgacgttattcacggaatcctggatggcatggatgagagacctgagcgaagcggccatattgttaaagcttttgccaagctcgcctaattcatcttttgactgaatctcgatcgtttctgttaagtcgccttcactgatctgtttcgatgatgtcacaagctgcttgagcggttttgtgattgaacggataattagcaccatgacgatggttccgatcacaatcgctaatacgagaacgagcagggacagatgaaggatcggcagggccgcttcatgaatttcgtccagatacatcgttccggtaatcttccagcctgtcagcccgtttgtatcataagccattttcttttcctggccgtcgtatttgtattgaaaatcaccttttttgctggtgaacagctgttcagcccactccccgtttaatactgtgcctgacgtgcggttcgggtgggcgaccacttttttgtctttcgtcaggataaaagcgtagcctgattttccgatgttcactttctttgtcgttttcagaagctcatcgattttcatattgatggcgacgactcctgagccgtctttcgtctgctgaacgaccgtcacgaccatcgtattggtggaagccgtgcggtaaggatctgttacaacaactttccccttattttccacggcctttttataccagtctctttcaagcggattatatcctttaggcatctgcagatccggataccgtgtgaaatgtccttccgtgtcactcgtataaatggattccacgtctttattgatcttcatgtactctgtgaatttatcggtaatttgcgattggtttttcggcttgtaccgatcctttgtgagccagtcgctgaaatatgccgttccgtcttccttttggctgatgcttgtgttgatcatatcgttaatctgctgcacattatctagtgcgcttcccatcatctgcctgtcaagcgtgcttaccgccgattgataggcgataaaagccagcgttgaaataggaagaatgagtatggccaaaaaagaaatgagcagttttcttgtaagcgatctctgcttgatgatttgcacaatttttttcatctgctatatctcctcttgcgtgtttacccttcatatcggcaattatgggtaattatacacatccaaaaagaagaaatataacgaaacatactttttacctatcttaaaattagtcttttagacttaattaagagtttatcttaaaacgctttgtcagttcgcgtaattcttccgccattttttccagcgtgacggcggaggaactgatttcctccatggacgcaagctgctcttcagctgaagccgcgatgtcctgaatgccggctgcgctttgtctggagacggccgcgatatcctctgaagcgtttgatacttcctgagacccggcagaaagctgttccacggttgcattcatattttgcagttcaccggcaatctgatttgttttaacggaaatgtcccggaagcttttttccgtttcgtccgttaactgaagtccgcttttcacctcgtgattgacggattccagcattccgagcgaagtatgaatttctttgacgatttcatgaattaaggattcgatttctttcgctgaatcggcggattggacggcaagctttctcacttcttcggcaacgactgaaaaaccgcgtccgtattctcccgctcttgccgcttcaatggctgcatttaaagcaaggagattcgtttgatcggcaatgccgttaatgacgcgcaaaatgctggtgatgtcctgcgatttgagttcaagcccttgtacgacttgctccgctttacttacggattggtcaatggcgcccatctggccggctgttttcttgacaagccgctcaccggcgccggatatctccgccgattcaattgacgtttccgtcaccacggctgccgcttccgccagatcactgagcccgtctttcatctcattcacttgggctgtcgctttatcaatactctcactttggtcttccgttccattagaaaactgttcaatcgcaagggtgatatgttccgttgctttgctcgtctgctcagccgaagccgtcagctcctctgaggaagaagcgacatgttcaacagagtcctgaattccctgaataagcgaacggagtgaatctgtcatatgattaaaacttttaccgagcacgcccagctcatctttagagctgacatcaatggtttccgtcagatctccgccgctgattttttccgctgaagctacgagacgttttaacggtttggtaattgagcggatgacaaaataaatgaaaatcatccctgcggcaatggctatcgccaatatgataacggccagagtcagaaccggtcttgccgcatccttgatttcttccacggacatggttccgctgatcttccagcccgtcgcttcattggtcacgtacgccatttttttcgctttcccgttcagcgtatattcaaagtcgcctttttgcccgctgaataatgtatcaacccattttcccgataccgccgcgccggctttttcatcactgtaggcaacggcttttttatttttgctgaggataaaggcgtatccttcttttccgatgttcacttcttttgtcatcgtgatgagatcgtcgatttttatatcaatggcgacgacgcctgatccgtcttgcgccgcgcgggccatggtgacaaccatctttttgtttgagatggactcataagggtctgtgatgatggtttggcctttattctccatagcttcctgataccagcttctttcaagcggattgaaatcggccggcatatcggcatgcggataacgggtaaacgttccttccttgctgcttgaaaatacggcggatgctttatcattgctttcaataaactgtttgaacctttcttgcatttccgtttggtttttttctttaaatttagcgcttgtcgcccattcgctgaaatatgctgagctttttgtaaacattccgatccggtcatcaatcatattgtttaagatttgcacatttccttcggcgctttccatcatttgcttttcaacggatgaagccgccgaacggtaggcgccggcagccaatactgctaccggaatgattaagatcagtaaaaatgaaatgatcagttttttggctattgattttctggcgattttttttgctgtttttttcaattttgtaaacctctttcaatcatttactgtttatatcggccaactccctttttattacattgaaaattaagtcataaatgaaaaatagttctatgtactccctttgtatgcaagactttttattcaattatccggctgtcactataaaaaaggacgccttccctccggaaagcgtccttttttactagttgattttaaattgtttcgttaattcccgcagttcttcggccatttgcgccaaagtatcggcggatgtgctgatttcttccattgatgcaagctgttcttctgcggatgcggcaatatcctgaatgcttgctgcgctttccctagatacgtccgcaatatccgtcactgcggctgaaacgtgctgggagctgtctgacagctgttcaaccgtgccgttcatcgattgaagcttctcggcgatatcgtttgtcatgccgaagatattctggaagctttctttcgtgcggtccgtcacggcaagtcctgattgaacttcttcattaacggatgtgaacatgtgaagtgatgtattaatctcagccgtgatttcctgaatgagtttttcaatctctttggcagaaccggcggattggacggcaagcttgcgcacttcttcggctaccactgagaagccccgcccgtattcaccggctcttgccgcttcaatggctgcatttaaagcaagcaggtttgtctgatcggcaatgccgttgatgactcttaaaatatgagtgatgtcttttgatttggcctcaaggccttttacaaccgcttccgcctgctggaccgattgattgatgagattcatctgcccgacggtttgctgcacatattcttcccctgtgccggcagcttccttcgattgtttagatgcttccgtaatggatgatgatgtgcgggaaacggcggcgagtccgtcatttatatgattcagcttggctgagcttgaatcgactttttcgctttgctcttcgtttccgtttgaaaactgctcaatcgccatcgtaatatgttccgtcgctttgcttgtctgcgaagctgaagcagtcagctcttctgatgacgcggccacattgtcgacagagttttggatcgcgctgatcagtccgcgcagagattctcccatttcattaaagctcgcgccgagttcgcccaattcatctttcgagcggatatcaatggtttcagtcaagtctccgccgctgatttgtttagaagagcggacaagccgtttcagcggtgacgtaatggatctgacaatcaacagaattaaaattcccccgatgataatggatgctgcaaggacgatcatccccatcgtcagcaccggttgtgaggcgtctttaatttcgttgagctccatgctcccctctattttccatccggtcagtttatttgtcgtaaacgccatttttttattttgatcatcgagcttgtatgaaataatgccgctgtctttgctgtatacctcattcagccacggggttgaaactttgtcgcccggtttgtggtctttatgcgcgacataggttttatttttggatgtgataaacacgaatcctttttgcccgattttgattccctgcatctgcttcagcagctggtcaatcgtaatatccatggccactacgcctgttccgtcctgcatctgctttgccacggtaacgaccatgctgccgtcgcttgccgcggtgtaagggtcggtgacaacgagcgtgccgccggccttcacagcgtctttataccaagtgcgtgttctcggatcgtaatcggccggagtattctccttcggcgcctgtgcgtagctgccgtcttccgttcctccgtaaatgcgggctacgtccttatgaatagacgtgtattgcccgaacttttcttcaagagcagacatgtttttctttgagaaggatgatccttttaacgtttcactgaaaaattcaatcgcctttgcttttgagccgatatcatttgtaatcgttgtgttaaaagattcgatgttatttttcgcgttgcctgaaatctgatcatccagcgaattgctcgccgtatggtatgaactgaattctaacacgagaatcggtatgattaagatcacgataaatgaaatgattaatttacgtgaaatcgatgcctttgtgcaccaattgatgaattttttcatattaagctgctccctcaagtgtgataccttatatatcggctcagtcttcacattttgttaacatttcctccttttttatgacttgattttcattgcccaagcttcctgcatatcttataaaaaaagatagggggcgcgcagatgattatcatatccggccaagtgcttcggcctcaggacatcgcgaactggcagacggaaaaaagccttgttccgtatataaatgaactgctcaattctcccgtacaattcgattacgggtcgattgctgaactgatgttcgaggtgcggctgcgccgccatattgtggaagccgcaagagaactgcacggatcaggtgtgaaatttgcaactttcgccaaaacatacggaaatacggcttattggagagtgacgccggaaggagccttggagctgaagtacagaatccccgcttcaaaagcgattcgggacattattgaaaacggggcgttttacgcatttgaatgcgctaccgccattgttgtgatttattatctggccgtcttaaagacaatcggtgaagaacggtttaaccggcgtttccgggatatcactttgtatgactggcactatgagcatctgccgatctacacggaaaccggcagccactttttacggggagattgtttatattttaaaaatcctgattttaatcctgcaaaggctcagtggcggggagagaatgtcattgtgatggggaatgatcaatatttcgcccacggtctcgggattctgaccgctgaacaaatcatccagagattgaattctttaagaaaaaaaaatgccgtgcagccggcttatctgcttaaccaggcaacaaggcttgatgcacccgcgctttatcagatcatgcattaaaacaatcccatcgtctgtcattgtgacgatgggatgcggaatgcttttcttttccggtaaaaagccgtcgtgccgagcgcttggtttgcagcccattcaaacttctctaaatcatgtcgggtgacggctctgtcccgtcggctccatttaatggcgcggacaaagtaataccctttaatcggcgccatggtgactttggaatgcggaaaatcttcaaagacaaactcaatagtccctctttttttgtaggacatttgaagaatcttcatcatccatcacctcacgatttctggattatgattcgcacaattcttccaaaacggttttcacgtctgtcggcccttcaagtttcgcggcggactggccggcccataaagacatatactccgcgtctcctgattgagccgcgtgcccgcgcatcggctttgtcagcgtattatgcagcggataaggcagcgtatttccctcgtcagcctcatatgttttcatgaactgattcacgattccccgcgcctgttttcccgaaaacagggtggtcagccgcgtgtcggctccttttgaatcggcaatggctttttgatatcccggtgaggcgctgctttcttcacaaaggagaaacggtgttcctacttgaacgccgtccgcacccaaacagcgggcggcctgcacgccgcggcggtcaaaaatgccgcctgccgcaatcaccgggatattcagcgcgtctttagcctgcggaatcagcgccataaggccgagagccggttctcctttaaccggcagaaacgacccgcgatgtccgccggcttctattccctgaaggataacggcgttcattccccgttcttcaaaagccttcgcttcctccggcgttgtcgccgtgccgaaaaggaaacatccgcttttcttcagcttttccgccgttgcttccggcggcaggccgaaggtgaatgaacacgctttgactccgtaacggatcagaagctccgctttttcctcgaaatcattccattcttctttcagatcagagaacggcttggcgtcttttgccctcgggatgcgggctttccatttttcaaccagttccgcctcaggcatctgcctttcttccggaacgaaaagatttacttgaaaggagcggttcgtcagctctttcatctcgataagctgtttttcaagggcttgcgggctgacgtatcctgaagcgaggcttccgagcgccccttcattcgataccgccgaagccagacgcggcgtgaccagcccgccggccatcggcgcttgaatgacgggctttgttaatgacaatgcactcatccactcactcatttgtgttttcctccgtttcagcctgtattttgatataacatgttctgtttcgcggaccgtcaaattcgcaaaaataaacgccctgccatgttccgagtatcatgcgcccgtcttctatgatgacatgctgggaggcgccgattgtactcgctttcatatgtgccgccgtatttccctccatatgccggtccagttcgtgctcccacggatacatttcatcaaaccttctgagcatatccctcttcacatccggatcggcattttcatttatggtaatgccggcggttgtatggggacagtatatgagcgccaaaccgtttttcacgcctgttttgcggagaaacgcttcggcttcatgtgtgatgtcgatcatttcatcccgtctgtttgtttgaatctgcatttttttcagcatatgaatgcctcctttctttttctcttcctttcccatattcgtttctgtatttgtcttttcctgtcggatcgcgatgataaacgcagatcacaaaaaacttcagcctcgggactgaagtttttcaccatatatatacgcgggcctcataaggctttaaaagaaaggatgtcacatgccgatgcggtggtgtttccatgcttgcgagcacgagcgtatcggagtcaagcggataaccgggatgcttgtataaagcgggggttttagacagatttgtgatgatcagggcggtttttgttccgttttttcttagataggcataaatctgccggtcattcggaagcagcaattcatatgtgccgctgatcaatacgctgtgttcttttctgagggcgagcagccgtctgtagaaatggtatacggatgtttcatcctgcatttgtgatgcagcgttcagccatgtgtggttcggattcactccgagccacggagaagcatcagaaaacccgccgttcgcctcaccgctccattgcatcggtgtccgtgaattatcccggcccttcttccagatgatcttcatcactttttcatgcggaacgccgcgggacgtctctttttcatacagatatttcattgcggcgtcatcataatcttcaatggacggaaacgaaacattggtcatcccgagctcctgcccctggtaaataaacggcgtgcctttcatcagcatatacatcgcggcgagtgccttggcgctttctgtcaaaaaccgttcgtcaccccataccgagacggaacggggctgatcgtggttctccataaataacgcgttccagccctttccttcaagactgttctgccagccggacaagacgcgcttaagcgccggaatggagatgctttgatcatcttccgtatcccagaggccgagatgttcaaattgaaaaatcatttgaaagacgccgtgttcttcaccggcccaatcagccgcctcccaagccgccactccgttcgcctcgccgaccgtcatgatcggatagcgcgaaaatgtttcccgtttcagctcttttaagagatccattatgccttccccattcatatggtacgggaaagacgggacgtacgggagaccgtccggattcggcatgtcagggagcccttcttttttcttaatgtgagaaatggcatccacccggaagccgtctatgcctttatcaagccaccagcggaccatctcataaacggactgcctcatcgcttcgttttcccaatttaaatcaggctgttttttgtcaaacaggtgcaggtaatactggccggtctcttgatcatattcccacgctgatccgccgaaaatgctttcccaattgttcggctctttgccgttttttccgtctctccagatgtaccagtcccgtttttcggaatctttcgccgagcgtgattcgataaaccaagggtgctcatcgcttgtatggttgatgacgaggtctataatcagcttcatgccgagcgcatggacatccgcaaggagccggtcaaaatcctccatcgtcccgaattcgccggcaatttgtttataattccgaatatcgtagccgttgtccgcgcccggcgagtcaaaaacgggacaaagccagatcacatccgcccccaactcttttatgtaatgaagctttgctctgatgccgttcatgtcgccgattccgtccccgttcgaatccataaagcttcggggataaatttgatagacggccgccgttttccaccaatccgttttcataccgacactcctttctttacatcatatgaaggagcgggacgaagaagcattttttccataaaaaaagcctcattgcaaaagcaggaggctcagaaatcagtttttttaatttcaacgaagcggatatgatggtcttccgcttccagcaccttaaattcacacccttcggcatgaaacacatcaccatttttcagctccattttttgtgttaagagccagccggcaatcgtgtcaatgtcttcattttcgatggcgatatcaaggagatcattcacctcttctatgagcgccttgccgtccatcacataatggtgttcgccttttttgacgatgtggggcatttcatcctggtcatattcatcacggatttccccgacgatttcctccaatatgtcttcgacggtcacaagtcccgccgtgccgccgtattcgtcaacgagaatcgccatatgaattcgctccttctgcatgcggatcaaaagctcctgaacggggatgctttcaatgactctgatgaccggacgcataatttcttttaattcaatggagcggccgagaaaatacgccttaaataaatccttattgttaataatgccgagaatgtgatctttgtcttccttaataaccggatatcgcgtataccgttcgttgatgatcaaatgtatggcttcatcaactgactgttcaagcgagatggcggcgatttcggtgcgcggcaccatgatttctctggcgacccggttatcgaattcaaatattttattgacgtaacggaattcagattgattgatttgaccttttttatagctttcggacaaaatcagccgcaattcttcttcactgaccacgacctcatgttctttcaccgaatgaaaaccgaacagcttgaccaaaaatccggctgagccgtttaacagcttaataaacggatacatcactttataaaacagaatgagcggttttgccgtccacagactgacggcttcggctttttgaatggatatcgttttcggcgcaagctctccgatgacgacgtgcagatacgtgacggcgataaacgccgcaataaacgtgacgacgtgcgtaatggatgacggcattccgatcaggctgaaaacaggatgaagaagccgctgaatcgtcggttcaccgagccagccgagtccgagcgccgtaatcgtaatgccgagctggcacgctgataaatattcatcgagatttgaaatcaccctgtgcgccgcgagcgcccggctgtctccggtttcaaccagctccgcgatttttgaaccgcggattttgacaatcgcaaattccgcagcgacaaagatggccgttaatccgattaacagcataatgagaatcagttttaatataagcaaaaaaacccctaccgcaaacggtaaggggccacctccttcgtgttaattctcatcacgaccatttaagaaaatcatcacaaaacgaagcagctcgaataatgaaacgagcgccgcagccacatacgtcagcgcggcggcgttcagcactttattcacgccgtgttcttcactgttgcgaatgaatccttccgacacgataatccgcttcgccctcgcgctggcattaaactcgacaggcagtgtgacaagctggaaaaaaacagcggccgaaaacaaaataatgccgagtccgattaagttcaagctgcccaggagcatcccgcccaagaaaagcagaggggcaaccccggaggcaaaattgacgaccggaaaaattttgtgcctcagcacaagcgcgccgtatgattcctgatgctgcaaagcatgtccgacttcatgggaagcgacggaaatggcggaaatggagcggccgtaatataccggctcagataaacgcaccacccgctccgtcgggtcgtaatggtctgttaaagtgcctcttaccggttctaccggcacatcatataaaccgttaatatcaagaatccgtcttgccgtttccgcccccgtccgctgactggaagcttctacgtctgagtatttctgaaaattgcttttcactttaaattgtgcccaaaacgacaatcccaatgcagcaattgttaaaaagataaacagcatattatcctcttcctttttctcttatatcgtacgatctgcttatatattattttaatgattgtccgctttcctgtacagaaatccgcttcttttttctgacaggaatcaatcctccgagcatgatgaggatacacccggccaatccgatgtaaaacggaaacgtgcctgcggtctcttttgcaaaaacaagccatgaaaatccgccggacatatgattgtatccattcaaatcgaaaataagcaatacggccgccgaagcgagcagctgcgctccggccagcgccgccagcagtttttgaatgactgtcatttgactcaccctttttcggtccgctttctttatcatatgaaaaaatgagggtgaatatgttttcggcgatttttgaaagacatcaaacgaactgggacatactgtataaaaaagatacaggtgtgatcgacatgaaagtgacaaatggcgagaaagaacagctgagcaatgcgatagacagaatgaacgaggggcttgacgcctttatccagctctataatgaatcggaaaacgacgaacctctcattcagtttgaagatgagacggccgatttaatcagacatgcgcgtgactcatacggccagcaacagctgaacgaaaaactaaacaccattattaagcagattttatccatctctctgtcgaaagaagagccgggcgaatgaaatcaaaccgtttatttatttcctggctgagatggccgttatatgttcggatcggactgatcattatcgccttgattttattgttcggccaactcatttacatgcttgagccgaagcaattcacgtctgtgtttgaaggggtttggtgggcggttattacggtggccacagtcggctacggcgattacgtgccccagacgccgctcgggcagattgccggcatggtgcttgtattaagcggagcgagttttgtaaccgcctatttcgccacgctttcttcagccgtgttcagcaaacagcatcgctatgtcgaagggaaggtcgcctttaaaggcaaggggcacgtcattcttatcggatggaatgagaagtcgcatatgctgctgaaagaactgcagcacatcgcgccgtcaaaaactgtcgtcctgattgatgattcattaagggaagggccgcttattgaaaacgtccatttcatccgcggacatgccgctgatgacagtacgctcaataaggcgaatattacggaagccgataccgtcattttgacagcagaccagcagaaaaatgaatccgaagctgatatgctgtcggtattaacgcttctcgccatcaaagggctgcatccgtccgtttattgtatcgtggaaattttaacggaacggtatgtcaaaaacgccgagcgcgcaggagccaataagattctgtgcacatcacgcctgtcgagccgggtgatgtttgagcattaccgggtcaagctgcagcttgccaaaccgcaaacgctgtcagatctgacgctggagaaaaaggtgcgcatcattcccgtccccgaggatttaaagggttcatcttatcatgactgtgcgctctattatctcaaacggaataccacgatcatcggcatacaaaaagaagaggggccgatgctgacccctcccctgtcataccaggtgctcgatactgatctgtttttggctctttaatgcagcaggacgtcttccagctctttcacaagcgagatgccgatatctgtatatgagcggtcaattgctgcatcccgccgtttcggctcggagaattggttgaataatgactcaaaaacaccgccgcctgcgtgatcatccgtttcctcctgatagacgtgcctcagcaaaaagggggtgccgattgtaacggcggccccccgttcatccaggtgtcccttatttgcttcaacagggatacggagaaataaatagccgtcctgatcggaaattttgtaatcaaagaacccgcggtcatactcccagccgcctccgatggtataaccgatcggtttcagcacctgttccagttcgcggagtaaaaacgattgcccttcaagtgaagatggaatgctgatcatgtgcatatgctcctttttgtctttagcgtccccgctctgcggcatcttcatacggcgcccgggaagaatcgggagcggcagacagacgccggaaagagataacggcgcattcaatcagaacatacgtcacaattgcggagagaacggcttccgttgaaatatagaaaacggcggcatagagacagcacttcgtgatcagcgactgcatccggccaatcttcagtttcagccggaccatgtccgtaaacaagccgagagggaaagcgaaaaacaggatggtttgtaagagggattcaggagacagttttagtgccgaatagacaatagcggcggaacagacggaaatgacggcatgcttacataagagtcgtatcattcatcatcacacctttcacggtttaaaaaaggctgacccgtcatgctgagggccagcctttctttttatttttcaaggcgtttttcaagctctgcttttttctcttcaaagcccggtttgccgagaagcgcgaacatattcaccttataggcttcaacacccggctgatcaaacgggttgactccgagcagataaccgctcatcgccaccgctttttcaaagaaatagacgagatatccaaatgtatatgcattaagctccggaatattgacaattaagttcggcacttttccgtctgtatgggcaagcatcgtgccttcgaacgcttttttgttgacgaaatcgaccgttttgccggctaagtaatttaagccgtcgagatcattttccgcttcttcaattgtcagctcatgcttcggtttttcaacgtttaatacagtttcaaacagatcgcgtctgccttcctgcacgtattgaccgagagagtgaaggtctgttgagaagttagcggaagaaggatagatgcctttttcatcttttccttcactttcgccgaagagctgcttccaccattccgcaaagtattgcagcgcaggctcatagttgataagcatttcaatggttcttcctttattatacagaacgttgcggacgacggcgtattggtaagccgcgttctcttctaattccgagctggaaaagtctttgcttgcatcaagagcgcctttcatcatttcatcgatatcagccccgcttaccgcaatcggcagaagacctaccgcagtcagaacggagaaacgtccgccgacatcatcaggaataacgaatgattcgaagccttcttcattagaaagagtttttaaagcgccgcgctctttatctgtcgtcgcgtaaatccgcgctttcgcttcttcttttccgtatttttcttcaagaagtttgcggaaaatccggaaagcgattgcaggttccgtcgtcgtgcctgatttagaaatgacattgatagagaaatcagcgtcttccaaaagatccataacatctttcatataagttgagctgatattgttgccgataaagataacttgagggtttttgcgcttgtctttcggcagaacgttatagaaagaatgattgagcgcttcaatcgccgcgcgggcgcctaagtatgaaccgccgatacccacgacgagaagcacgtctgaatctgatttgattttttcagcgctttttttaatgcgcgcgaattcttctttatcgtagttttcagggaggtccacccatcctaaaaagtcgcttccggcgcctgttttttcatggatattatggtgtgccgtttttacgaaatcacgtgcgtatgtaagttcatgttcattgaaaaaaggtaacgctcttgagtaatcaaagcgtacatgcgtcatttgcttgtccctccatcacggtgaattgttttctctttcactttatatgaactcacccgctaaatcaagtcatgaagaaagcatgatgaatacgggatttgcgctaaaaatgcattcattttttatacaatatcccgtattcgatatggttatatttgtaataatcgtgagaggcataacgaatcgaatgttggtgatccaggaacgtatcacctttactttggagcaggatgacatccatcgccaatcccgatgggacgtttctttttatacagtactcctcttgagaggctgccacgaaggaatattaaggcataaatgtccaattttaaaaatagtgtctatacttggagtatcgtgttaagatgaaagtgattttaaaccgggaggtgattttatgactaaaaccattggtcttatttgtggaagtttacgaaaaaactcgtataatcgagcaattgctcaatcattgattgacttcgataatgcggctcaatttcgttgggttgaaatagacagtcttcctttttttaacgaagatttagaaattgccggagcaccagactccgtaacatcctttagagctgatatacaagacgttgacggcgtcatcattgtaagtccagagtacaattccggaattccaggggtattaaaagatgcattggactgggcatcgagaccgcggacctcttctgttttaaacagaaaaccggttggcttaataggagcaacccccggagggttcggtactgcctttggtcaaacgcaaatgcgagaagtactcgaagctatgcaagtcaatgttttgccctttcaaaaaatgctgatttcgcaagtccatgagaaaattgattccgctcaaaacatacttacggatgaacaaacaaaacgttatcttcaacgctatttacaacagttcatccattggattgatcatgctccggttcccgttccaaattaattgaaggatcatccccctcacgaaaagtcacctcagaaataactttctttctatacagcatatgaatagatttaccgttttcaattcacaaacttacttgccttaattcaaggaggatgataaaatgtctgatctttattcccgtctttcaaaagatgatgctgccgtgcttttagttgaccatcaaaccggccttatttccggtctcgtgcgtgactatggcgttgatgaatttaaaaacaatgtattggctctcggtgatacggctaaattctttgatttaccggttattttaacaacgagttttgaaaatggacccaacggaccgctcatgcaagaactcgttgatctctttcctgatgcgccaaaaatagcccgtcccggacaaattaatgcatgggacaatgaagactttgttaaagccattgaagcgactggcaaaaaacagctgattatcgcgggggttgtaacagacgtctgcgttgcttttcctgcgctttctgccattaaagcaggctacgaagtgtttgttgtgacagatgcttcggggacgtttaataagcaagtagcagatgcatcattaacgcgtatggctcatggcggcgcgcagcttatgaactggttcagcgtagcatgcgagttacagcgtgattggcgcaacgatgttgaaggttttggcgcattaatctccagtcatcttcccggttatcaaaacttaatgggaagctatatgggggcgcagcgggatcttagtacacaaaatgcataaaaggagcgctgattgaatcagcgccccttttttaaattcgcggctcttcatgatttagattttgtgtaaatagatgatcggcaatcgcaaagtcaattgatccttttctgctaaatgtacagaaacagggagtcaaatccgcatcatgtgagatttccatagttgtctcatggcaaggggtgtttcacttgctcttgatgcactaatgaagggactcccaaaacggttacatctgcagcttgaaaatctatttcatcttcagcccggccgggaatgtatcttacagtgacgcctttaagatggcaagtacgtcatctttgttcagtttttggaaattgccgaatccgccgtattccatttcttttgcggcgatgtctgcgatcagctcaagcttgtcttcaccgatgtcataatccgcaaggcgggacggtgcgccgaggcttgtccagaacgcggacaatttatcaatcccttcaagcgcaatttctttatccgttttgccttcagtatcaatgtcaaacatgttgagcatcaggtttttaaaacggtctacatttgtatccagcgtgtatctcatccagttcgggaacagaatcgcaagtcctcccgcgtgagggatgtcataaaccgctgatacggcgtgctccatcgtatgggaagcccaatcgccgaaatagcccatttgcagcgtgccgtttaatgcgatcgtacccgcgtataaaatcgtttcacgatgcttatagttctcaaggtcttccaaaagtttcggcgctgtttcaattaccgtctgaaggaccgcaaaacacattctgtcctgaagcggcgtgttttcaacattgtggaagtattgttcaaatacgtggctcatcatatccaccatgccatatacggtttggttttccggaacgctgaaagtattctcaggatctaaaatggagaaacgcggatgagtgacattgctgccccatacgaatttttcgtttgtttcccaatttgtgataacggaatcagggttcatttcagagcctgtcgccgcaagcgtcagcaccgtaccgaacgggagcgcgtcctgcgccgttacttttttgctgtaaatgtcccatgcgtcgccgtcatatttcgcaccggccgcaatcgcttttgtacagtcgatgacacttccgccgccgactgcgagaaggaaatctatctcatgctgtctgcacagctcaattcctttatttaccgtttccagacgcgggttcggttcaacgcccgcaagctcatgaacggttgcgccttcttcttttaagatgcctgttacttggtcatacaggccgtttcgcttaatgctgccgcctccgtatacaagcagcacgtttttcccgtattgcttcagctcttttttcaattggtcgatttgaccttttccgaaaatcagtttcgtcggattgtagtacgtaaagttctccatttatcataacctccaaaaaaatcgtaagggaattactataacacagaaaaaaaggagctgccaatccggccgccccctttatgttattacaatgatgctttcagtatcgcaagcacgtcttctttctgcagtgacttgaactgtccgaatgctccgtttgccatcgctttatctgcaatcgtatccagcttctcatcagaaatatcataatcagcgagtctgttcggagcaccgaggctcgtccagaaatcagacagcctgctgattccttcaagtgcgatctcttcatctgatttgcctgtctcgtcaatatcgaagacacggacggcaagctgtttaaagcgggccggattttctttgagcacatgtctcatccagttcgggaacagaatcgctaaacctccggcgtgcggtatatcgtaaatcgctgataccgcatgctcgatgttgtgtgtggcccaatcccctcttgcgcccattgacagcattccgtttaatgcgatcgtgcctgtatataaaatcgtctcacgaagctcgtagttctccagatcattgatcagcttcggcgctgtttcaatcaccgtgcgcagaagcgattcacacatccggtcctgatacggcgtgtttgacgtgtggtggaaatattgttcaaacacatggctcatcatatcgaccatgccgtaaatggtgtggtctttcggaacggtaaatgtgtttaccggatcgagaatagagaatttagggtaaacgagcgggctcccccatccgtatttctcttgtgtctcccagtttgtgatgactgatccggagttcatctctgaaccggttgccgcaagtgtcagcactgttccgaaaggcagcgcttctttcggctggtgttttttcgtgacgatatcccacgcgtcgccgtcatatttagcgcccgccgcgatggctttcgtgcagtcaatgacacttccgccgccgacggccaataagaaatcgatgctgttttctttacagagcgcaacacctttgttcaccgttgagacacgcggattcggctctacgcctgccaattcatgtacggtaactcccgcttttttcagaagttcggttacttgatcataaagaccgctgcgcttaatgctgcctcctccgtatacgagcagcacgttttttccgtacggtttgatttcttcaggaagtttttcaacctctccctttccgaaaatcaatttggtcggattccaatatgtaaagttttgcatgacatctcctcctttggatttatattatgcagaaagatgacgttcaatgtaaagcaatccgcttttttgacggcgcatcacatggtttacagacagcggcttcccgggaaaggcacttgtacagcctgagacagtgtgtgattttacacggcggagaatgtagtatgcatagattctttgctttgtcacaatctataactgtttcacgaattcatagaggaggttgtttacatgagtgttattcagcgtatctgtctcgtattaacgattatcggcgctattaactggggactgatcgggtttttccaatttgatttagtagcagccatcttcggcggccaaggatcagctctgtcgcggattatttacggccttgtcggcatcgccggtctgatcaatctcggcctgctgtttaagccgaacgaagaaacatcccgcgaggaagcggcaaatccggaagtcagataaacataaaaaaagcaccgaacatacatatccggtgctttttttaatgattattttttgataaggtctttgcggttggactgttcaatccactcttcaagcttatctttcaatgtgttgaaaccttgcggagcagatgtttcttcagaagcttgagccgctttcggttttcttggtttgctttcttttctttcaggcgccgcttgagtcgcacggatagaaaggctgattttgcctttttcttcgtcaaccgcaagtacttttacttgtacttcgtcaccgatagaaaggtgttcgttaatgtcttttacgaaaccgtgagtgacttcagaaatgtgaacaagtccttgagtttcttcatctaatgcaacaaacgcaccatacgcttgtaatcctgttactttaccagtgtaaacactgcccacttcaaattttgctgccattcataacaactcctaagttaaattaaatacagattatacgcaatttaaaattatatcatacatgtttgtttttcgcaaagagaactttttttacatcatcatgtttaagcacagataaaggagggtatactatgattacgaaggctttctagtattccccccttttatttggatgcgaaccgggttcgtatctttttttatgcccttttttcaacaaaccgtttgattctgacgagcgcttcctgaatctgctcaatggatgtcgcataggaacatctgatgtagccttcgccgctcgggccgaatacattccccggaacgacggctactttttcttcaataagcagctgttccgcgaattcttctgaactcatgccggtcgactgaatggaaggaaaggcgtaaaatgctccgccggggtggtggcagccgagtccgatttcgttcaatgtctccacaatcaggtttcggcgtctccgatagcttttcttcattctttcgacgtcttcctggccgtttttcagcccttcaagcgccgcgtactgagccatggaaggcgcgcacatcatcgcgtgctgatgaattttgagcatcgcatccctgatcacgggaggcgccgccgtaaatccgagtctccaccccgtcatggcaaatgctttggagaagccggaaataagaatcgtgcgttccttcatgccgcggatggcccccatgctcgtgaatggctcatcatacgtcagctcggcataaatttcatcggcaagcacgatcaagtcgtgtttttcagcgaaagcagcgatggattcaagctcttctttcgaatagacggaacctgtcggatttgacggcgagcatagaatcagcgcttttgttttgtccgtcagggccgcttcaaaatcggcggctgatgctttgaaaccttttgcagcgacagtctgaatcggcaccggtttcgcccccgttaaggtcacgagtgattcatatgcgacaaaacacggttcgggaattaacatttcctctccaggattcataatggcgcggacagcgagatcaagcgcctggcttgcccctacagtaacgatcagttcactgtcaggcgaataactcaggccgaaccgctgatctaaatagcggctgatttcttctctcagttcataaaggcccgcatttgccgtataagccgtataaccctgttctaaagaaagaatactcgcttccctcacgttccaggccgtcacaaagtcaggctctcccactcccagtgaaatgacgccttccatcgtggcggccagatcaaagaacttgcggatgcctgacggtttaatctgctgcacgtagtcagataaataagaagtcttcgtttccatttacggagacaccacgattcttttgtcatcgtctccgctttcaaagactttgccgtcatgcttatattttttcaggatgaagtgcgttgtcgtggaaacgacagactcaagggtggacaatttttcagacacgaagctcgccacgtctgacatcgtgttgccgcgaataacgacagataagtcatacacccctgacatcaggtacactgattcaacttcctggaatctgtatatccgttcagcgacttcatcaaagccgacatttcgtttcggagtgacttttacgtcaatcatcgccgtgacgccttccaaaccatcgactttgcgccagtcgatcatcgccgcataatcaatgatgactttttccttttcaagcttttcaatgatgcttttgacttctttggcgggaatgtttgccattttcgcaatcgtttccgcatcaacgcggctgttttcgtctaaaatttctaatatttctgtttccttttcggtcagcttcatacgtttcacacctttgcattatcaaaaatcttcatgacattatatcacgattttcgacaaatgctaagaaaaacccgaaagaaaccagagctaaaatctgacaatcaaaaaagcctttacattacaacaaagaaaggacggcgaaggctctcatggaagctgtttcaccgattaaacgggccgcgatagacggagttgagctgtattacgagcattatgaaaatcccggcagacagacactcgtctgcgtacacggttttttatcttcggcattcagcttcagaaaactgatcccgctgctcagaaaccattatgatattatcgccgttgacctgcctcctttcgggcaatcggaaaagtcacggactttcgtatatacttacgcaaacctcgccaagcttctgatcggacttctggaaaagctcggtatcagccgggccgcactcatcggccattcaatgggcggccagatttccttatccgcgtctcttctcagacccgagcttttttctaaaatcgtcctgctgtgcagctcggggtatttaaagcgctcgcacccgtcgattatattcgggacgcatctcccttgttttgacctgtatcttaagtattggctttcaaaagacggcgtgctgaacaacctgttaaatgtcgttcacgaccggacgcttatcgatcaggaaatgattgacggttacgaaaaaccatttacagaccgccagattttcaaagcgatgacaaggtttatcagacatagggagggtgatttagagcccgaggatttgaagaaagtgcaaaaccccgctcttttaatctggggagaagaagaccgtgtcgttccggtctcagtcggaaaacggcttcatgacgacctgccggattccattctgtattcactcaaggatacggggcacctcgtacccgaagagcgcccggagtttgtttcggagcggatttttgaatttattcaataaaaaaaccggcggaaccgccggtttttaaggggtgcaggagctgctttcttttatgaacagaagctgctcggcggccttttggcagccttcgatcggaagctttcgctcaaatgaagcttcaaagatatcctgaatggctgctgccagcttgtcggcacggtcttcactgtagacggcctgaacgatatcgacggcttctgtctcataaaaatcttctccatatttaaacgggtcccacttggcaatgattttcatcatttccatgaccgcttggctttcttccattttcatcaccgcttataataaagtttgcaattctattttatcatagatacgctgtgcaaaataatgatactacaggagtgacatacatgaactttgatcttcgagaaaaccgtcttggcacacaatcggtgaaatgggacaaggcggaagcgttattcggcgtatcggatgcgcttccgatgtgggttgccgatatggatttccgcgctcccgaagcggtcactgacgccttaaaagcccgccttgaccacggcatattcggttatacgtctcctgacgaaaacacaagagaagccgtcgcttcatggcttgagacgcggcacggctaccggcccgatcccgcaagcatcgcgttcagtcccggtgttgtcacggcaatcagcatggccgtacaagcctttaccgaaccgggcgatccggtgttgattcaatcaccggtgtatacgcctttttatcagatgatcaaggaaaacaaacggcaggttttacataacccgttacgggaagaaaacggcgtctactgtatggattttgaggatcttgagaaaaagctgaacgattctgaggtcaagctgatgattctttgtaatccccacaatccgtccggcagagcgtggagccgggatgagcttatgaagctcggatcgctgtgcgccgcccataacgttaccgtcgtttctgacgagatacattccgacttgatgctgtacggaaagccgcatacgcctttcgcttctctgtctgaggagtttgcgcggatttccgttacttgtgtcgcgccgagcaagacgtttaatattgccggcattcaggcatccgccattatcattcccgatcggtataagcgggcgaaattctccgccgcattgcatcagaacggaatttccagcctcaacacatttgcggttgcagcaatcgaagcggcctatacaaagggaggcccttggcttgacgcgctgattccttacattgaagggaatatgaaattggctgaggactttttaagaaaagaattgccgaaagtccgcatgatgaagcctgacgcttcctatttgatctggatggatttcagcgaatacggattttcggatgccgagctcaaagaaagaatgctcaaaaaagggaaaatcatattagagccgggaacaaaatacggaccgggcggcgaaggatttatgagacttaatgtcggctgttcagccgccgccgtaaaagaagggcttgagagaatgaaagcagcgctcgcttagcagcggaaagaacgcctttatcagatgagataagggcgttcgctttagagaaatatatacttttttttccggtaaagatgttataatagattcatatttacataggaaaggatttcgcataaatggagattgtaaaggattacctgcttcacttctcttttattttattccctatttttctttatcaagtcttctggctcagcaagcccgatttgcttgtgccgagagcgaaccgcctgctggtcgccgtatttgcagtgtcatcttccttattatgtacggcttttcccatccaggagcttcattccgtccgttacggtttgcagctgattcccattatcgtctgcctgctttattccggtaccgccgcaggacttgccgcaggggcggcatccgttttttttcagctcatatggtttgaaccttccgctctttttttcttatccttaattccttttttaatcatcatccctatccagctccaaacgaaatggccttttttttcaaagcggaagaaactgcttttcgctcttctcatcggctgcactgaaaccgccttattaaccgcatctgtcttcatctattccgcgaccaatattttcaattttcaaaatctatcttccgtttattatgaggcggcagtatctgttttttttcaagtcagcgcccttttgctgtgcatttatttgattgagatcattgatgagaatgcgtccatgcgggcaaggctgattcactcagaaaaaatggccgtcgtcagcgagcttgcggcaagcgtcgcccatgaagtccgcaatccgcttacggtcgtcagaggttttgtgcagctgctgttcagcggcgagcagcttcaggacaaatcccactccggatatcagaaacttgtgctgtccgaactcgaccgggctcagacgatcattacgaattatctcgatatggcgaagcaggatgactatgaaaaagaaaagtttgatatttctctgctcgtaaaggaaacaggttccttaatggagtcttatgccaattttaaatcggtgaccgttacggttcgaagcgagcctgatttatatgtgttcggcgatgtaaaaaaactgaaacaggccttcattaatctgattaaaaacagtattgaagccgtgccctctgaaaacggccgaatcgaggtctccgtccaaaaacaggaagagatgattctcattcagattacggataacggaatcggcatgtccgatgaagaactgcagaaactcggcaagccgtattatacgctgaaaacgaacggcaccgggctcgggcttaccgtgacattctcgattattcagcatcatgaaggctccgtctgtttcaccagcggcgagcactcgggcacaacggcctcagtcaggcttccggcagctgttcactagccaaccgcgttgatcttttatagaataactagagagaggtgaacgctatgaatacgtttgaaatcggcacaatcgtaaaagggttttataaaacaggagcatacataggggaagtgacagacgtcaggcccaatcactatttagtgaaaattaaagccgttctgacgcatcccgctcaaggagatcttcatcatccgaagcaggcggatgttccgttttttcatgaaagaagagcgcttgcattcggggaacagacaaacataccgcatcagatggtcaaaccgtttgatggcgaggtgcctgattatacggcttccttacaagcggcgtctgcccggctgaaagatcagcttacagcggacggctcagaatgggcggaacgttcgctcgacaacttggccgcgttagagcgtgactattttaaaagaacttgacccagtcggcatgattgggtttttttatgtggcccggcgaaacagttcagtcagatcgacgcgatcaccgatcgtcggaggtttcggtttttcaagatattgtttatcccgctcgacaagcttgaataatttgtatgtcgtccgcgcatcatccagcgctttatgatgcgtgcccgtccctttatcgccatactcttctgccgctttccaaaggccggtcaatgttctgtcgccgaagaaatttttgtattcaagggacagatcccgaagttctcctttgaacggaaaagggatgtggttaaacatgcaattttgctttaacactttcatatccatattgccccaggtgacgatcgtgcagtttttatcaggatcaagctcatttaatttgcggatgaattcattaaacgtgattccgccgtccacgtctttttgggtgatgttcagaaaggttttgcatcgtttcgtcagcttcggaaattttttcggtttgatataactcgaaaacgtttcagtcacttcatcattcactgtcttgacaatccccgcttcaataatctcgggaaagaaattttgcgggctgtattttccgtcaggcattgtaaattcaaaatcaataatgagcagactgcgctgatccactttttttacacctgcctttcctccgatcaaaaatgatattttatgatagtatatcagtttcccctctgaaactttcttcattttctaaaaataatgaattttcctatatccgcatcgaaaatacaaataccggattcattcctatatactaatgattagatacacgaaaagtaaagaaggtgatgttatttctgtccgtaagaagaacttcgtcgtcatttggattacaaatttctttatttccgccagcatgaccatgattgttccgtttctttcgttatatatcgaaacgatcagcccccattcgggcgggtatgtgcagagatggagcgggtatgtgttcggcgtcacgtttttaatggcgtttgtgatttccccgttttggggcagattcggcgataagcgcggctacaaaaaaattctcttgattacaggaaccggcattgccgtcagcattttattgatggggtttgtgacatccgtttatcagctgtttgtcctccggctgcttatgggtctagtaacaggctttgttccgacatcgcttgccatgatttcggcgcagacgccgaaagagactgccgggaagacgctcggcacgctgcagatgggtcaggtgtcaggcactttattcggaccgatgctgggcgggctgctcgctgacagcttcgggtttacgtacacattttttattacgtcttttgtcattttcgcatccgtgcttctcgttttatttcaggtcaatgagcagccgctcggcgagaaacaaaacaagcggaaaacctattccagaaaacaggtgctctcctatatttttcaccagcccgcgctttgggcgatgatggtgcttactatgatcgtgcagaccggcaatttcagcatccagccgctgctcgctttatatgtcaatgagctgcacggacctgttaatttagcttttttctccggaatggcgttttcagcgaccggactcggaagcttactgcttgcccggaaatggggggacttcggcgaccgcttcggccacagccggatcttaatcgtgcttttgattgcctcagcggtgtttttcattccgcaggcgctcgcctcctccctctccattctgttagtcttcagatttctgttcggcatggtcatgggcggcacgctcccctgcattacggccgcaatccgcgtcagggcgccgggcagcatccagggagaggtgctcggctataacgtcagctttcgttttctcggaaatgtgctcggccctctgctcggaggtgcggtctcaagcggtttttccatttcggctgctttctacgtcaccgcctttctctttttaataggcgcggggctcttatggatggcgggacatctgcaaaaggatacagcgtcaaatgcgggctgaccggcagcgatcacgatttcttctaaatttaaccttctcgtattcttaaaagaatgatacgatatggctagaaatcaggagaaaagagagtgaccatggtacgtaaaataatcggatggattttgctgctcggcattatcccgttgtgtgcatttacagttattgcttccggcaaagaggtaaaacaaatcaagccttttgatcaggtgctcgataaacatattgatttaaaagcgatcaacctggttcaaaacagttacatgtatgacagggacggaagccttgtttctgagattgtcagcgatcatgagaaccgcgtgatcgtgccctttaataaaataccgaatgaggtaaaacaactgtttttaacctctgaagaccgtcatttttatgagcataaagggtttgactttatggggatggtcagggcggccgcctccaatttcaaagatcataaaattgatcagggcgccagcaccatcacccagcagctggcaaggaatgtgtatttaagccatgaacgcaccttcagccgaaaactgacggagctggcctattcctatcagcttgagaaaaaatacagcaaagatgagattttagaaggctacttaaatacgatttattttaataacggcgtatacggtgtcggttcggcggcacaattttatttcagcaagccgctgaaatctctcactttgggagaaatggcctttatctgcgccatccctaataaccctacattatatgatcctctcaagcattttgattatacgaaaaaacgacaagtcagattgcttaacggattaaaaaaagcaggcgttatatccgggaaacagctgaaaaaagccgaaaaggaaaagatcaagcttgatataaacgaaaaaacaaataaatatcctgactatgtttcctatgtaaatgatgaattcacacagcttgtttcatcatccgaaggctatgacaaacgtcttgaaaaagcttccggaaaggcgaaacaaaaaatacagagtgagctttcagacagagtcagcacattgttaaaagacggcgtgaagatttatacggcgctgaatccgtatatgcaaaaccaggtcgtcgcccaagtgaatcaaaatctgccgtatgcaggcgtccagggcggagcggccgtgattaatcatcagacacatcagattatcgcgctttcaggcgggaaagattatcataaatatgatttcaaccgtgcctatcaggcatacagacagcccggttcatccattaagccgctgcttgattacggaccttacattgaaaagaccggcgcaacgccacacagcaagattgacgcaagcaaattctgcagtgcggattactgcccgcaaaactacaataaccgcacgtacggtacggtcacgctggaaacggcgtttaaatactcgtacaacacaccggccatcagaatcatggaccgcgtcggcgtcaataaggcgttcagctaccttgaaccgtttcatttcgcgaagctggtcagcgcggattaccgtctgcctgcggcgcttggcggttttacaaacggcatgacgccgcttgaaatgaccaatgcgtacaccacgttcggcaacaacggcgtttatacgccgagtcacgcgattacaaaagtgactgatttaaaaggaaaaacgatattaaaatggaaagatgagccgacgcaggtattcagcgtgcggaccaacatgcagatcaaagaaatgatgaaagccgtcgtcaagagcggtacaggaaagaaagcgaactttaaagctccgtacgtcggcggaaaatcaggaacgtcaaatgactatcacgatatgtggtttgtcggcctgacggacgcttatacgatgggggtatgggtcggcaaggatacaccgtcaagcgtcgaataccttcatgacgcaagccctcagctttcgatctggaaaaacacgctgcaggcagcttattaaagataacggaggggatccgctttgaaaccagctcagcttccggaccgcgtacttttgtttgacggcgtctgcaacttatgcagcggcgccgttcaattcatcattaaacgcgatccggccggcaaaatctcatttgcatcattgcaatcagataccgcccgggagcttttggcatcagaaggacttccgacagaacaatttgacagcatgatttttatcgaaaacgggcggatatacaaaaaatccgcagccgtgttaaaggtttcccgtcatctccgcggagcctggcggctgtctgcggtttttttcgcagtgccccgccccctcagggacagagcctattctttcatcacccggcgccgttacaaatggttcggaaaaagggaagcatgcatgctcccctcccctgagatcaaaaacagatttctgtcttaacaaaaatggctagcttacacaggtaagctagccattatgctattataaagcttgataaagatgtacaaaataccgataacaaaagtaaaccaaaacagaatctcaagcaatataaaaccgatcagcgaaacgatcgagagtgtcgaatagattctgtacaccatgaaaatcaaataaacgagcgtaacaacggcaaataacgccgcaatccaaaaaccattctgcacgagcgcaaaggaaagaattcctccgcctacataaattaaagagcctaatctgatttttttcagattgtccccttcagggtcatttgtgaaaaacaaaagagacagctctgtcactgtgtttgcaattagcttcaaagccgaaaagagcataaaatacacaagggcgaacgctgcaaaaagcgccagtctgatccctttctcagagaaataatccagcatcccctgatacatgccgagcgtctgaagtatcttcatgacataaagcgaggtagaaatggataatgacgaactaaaaagcagaatcgcaacgagcggaaaataacccgtccaataagtatttttcatataaaaagtccctttctgtaatctacctcacttattatggaggacttaaaacacattgacaagataaaaaataccatttttcctcacttttacgaaataagggcctgatcttcacaaaccggctttttcggagtaaagtagaacgcgggaatgataaacgtaaggaaggctgttatgaaaaaaacattaaaattgcaaacccgattaacgatattcgtctgtattgtcgtccttatcgcactttgtatcacctttttcacgatcagcgtccaaacagcagaccgcgtgaaagaagaagaacggacgaccgcgctgcgcaccgcaaagctggtcgcggaaacaccgagtgtcgcgcgggcattgcaaacaagaaaagggctgaaagagctccgggattatacattagacgtccagcatacgacaggaaccgaatttgtcgtggtgatggatatgaacagcatccgcctcacccaccccgacgcaaataaaatcgggaagaaattcaccggcggagatgaacagccggcgatgcacgggcatatcaaaacgagcacatcagcgggaactctcggaaaatccatgagagccttcgtaccgatctatggaaaagataaaaaacaagtgggcgtcgtttcggtcggaatttcgcttaacaaaatacaggatgtcgtcagccacagtttgagaccgctttatttcatcatctgcgtaagtatttttgtcggcgtcatcggagccgtcattgtcgcccgcaccgtcaaaaacattatgtacggtcttgagccttatgaaatcgccaccctcctcgaagagcggagcgccatgctcgaatcaacgaaggaaggcatcctggcggttgacgcgcggggaaaaatcaagcttgccaatgcggaagcgaaacggctttttattaaaatgggtattccgactaatccggtcgatcaagatgtgaacgatattctcccgaaaagccggctgaaacaagtgattgaaacgaaaaaaccgcttcaggacagggatatccgcattaacgggcttgagctggtctttaatgaggttccgattcatctgaaaggacaaaccgtcggagcgatcgccacgttcagggacaaaacggaggtcaaacatttagcagaacagctgtccggtgttaaaatgtatgcaaacgcattaagagcccagtctcatgaattcatgaataagcttcatgtcattttagggcttgtccagttaaaagaatacgatgatctcggcacttacattaaagacattgccattcagcagaagacggaaacaagcgagattataagtgatgtcaaaagtccggttctcgcagggtttcttctaggaaaacaaagctacatacgcgaacagggcgctgatctggacattcagctcggcagcctgatcccgaatgcggcagatccggccgtcatccatgagctcattacgattatcggaaacctgttaaacaacgcgctcgacgcggtggcgcagatgccgaaaaaaaacattacgtgctcaatgcggtttcaggatcgccagcttgatatagagattacggacacgggagccggaatgtctgcggcagaccaagcccgtatttttgaacaaggttattccacgaaagggacaaaccgggggttcggcctctatttcacccagcaggcaacagaaaatttaaaaggccatatgattgtgacaagtgaaaagaatgaaggaacgactttcagtcttcgcattccgtatgaaccgaaggaggaaaatgatgattaatgtactcatagttgaagacgaccccatggtgggtgaattaaataaacgctatctcagccagattgaaggatttcagctgaaagggatcgcatcatcctttcaaagcgcgctgcacgtgctgagcgagcatcatatcgatctcatccttcttgacatttacatgccgggaaaaaacgggcttgagcttttaacggaaatccgcaaacaaaatgaatcggttgatgtcatcgtcatttcggccgcaagcgagctggacgtcatcaaaaaaacgcttcggtacggcgccgtcgattatttaatcaaaccatttgaatttgaccgctttcaaaccgctctttccgactacagacgcaagcagaaagtttatcaatcacacagaagcatgacacagaaagaattggatgccgagctttttcaaaagaaagaagcggcggaaaaggttcaccttccgaagggattgacaaaaagcacgcttaaactcatctgggcgagcattgagtctttcggtgacggctcttttaccacagaagatctcgccaagcatactgaaatctcgcaagtctccatccggaaataccttaaatttctggaagacatacaagtgctgaatgtagaaatggcgtacggcacgatcggcagacccgtcttccaatatcatatcaacaccggcaatgtcagcagcatcaaacaatatttataatgtcaaaaagcgccgttccgctgtgaacggtgcttttttactgtcatatcccgtgacaaaaggcttgagattccttttttgtatgctatataaggataatgacctggctgatcctcctctgttttatccagatgaggaagccgattcataaaattgatattttttaaaaaataagcaaatttctatttatttatggcgggtaaaatgataaattatgattggttagcagatcttttcagataagtcataagtcccgaacccggaagagacagccgctcaaggcgggaaaaagagagacgtctcatcattattatcagaaagttttttcgattctgcatccggtacggggactcaagtctgaattgaacggcacagccatattttacaggggggttatatctttgaaaaaacgcaaaatcggaatggcgatggcgctcatcgcggcggccggaaccatattaagcgcatgcggttcaagtgacaaagcaaacggctccggcagcaaaaactttaccgtcggcatggtaacagatatcggcggtgtcgatgacaaatcatttaaccagtccgcctgggaaggtattcaggcattcggaaaagacaacgggcttacaaaaggcaaaagcggttttgactatcttcaatcaaaatcagatgcagattatacaacgaacttaaataaattagcgcgggaacactttgacctgatttacggcgtcgggtatctgatgcaggattccatcagcgaaatcgccgatcagcgcaaagacaccaattttgcgatcattgacgccgttgtcaaaaaagacaacgtggcgagccttacatttaaagagcaggaaggttcattcctcgtgggagcggccgctgcgctatcgagcaaaacgggaaaagtcggattcgtgggcggaatggagtctgaattgatcaaaaaattcgaaatcggcttccgcgcgggtgtacaagccgcaaatccgaaagcgaccgtcgaagtgaaatatgcgggcggatttgacaaagccgatgtcggtaaggcgacggctgaaagcatgtacaaatcaggcgttgacgtcatttatcacgcggccggcgcaacgggaacgggcgtcttcacagaagcgaaaaatctgaaaaaagaagatccgaagcggaacgtatgggttatcggtgttgataaagaccagtacgcggaaggtcaagtcaaaggcacaaaagacaatgtcactctgacatcaatggtcaaaaaagtggatacagccgtagaggacttaacgaaaaaagcaagtgacgggaaattcccgggcggcaaaacattaacatacggtttggcgcaagatgcagtcggcatctcggatcacaaggagaacctttctgacgatgtcatcaaagcaacagacgattggaagaagaaaatcgcggacggactcgagatcccttcaactgaaaaagaattgaaatccttcaaggctgagtaagaaccaggggataaggagacttccgtgcttatcccctctcttttatgaaaagagcggtgaaggaaaagctgcatctcttgcagcttttcttttgccaagctctttctcatcaaagtatctctgaaaaggagcgtcaaatcggtggattatatcattgaaatgcttaatatacgcaaggagtttcccggaatcgtcgccaatgatgacgtcacgcttcaagtgaaaaaaggcgaaatacacgcccttctcggtgaaaacggcgccggaaaatcgacactcatgaacgttttattcggcctgtatcagccggaaaaaggcgagatccgggtgcggggcgaacgcgttcacatcaacagcccgaacagagccaacgatctcggcatcgggatggtgcaccagcattttatgcttgtggatacctttaccgtctcagaaaatatcattctcggaaaagagccgaaaactttcggccgaattgacagacagcgcgccgcccgggacgtgcgcgatatttccgaccgttacggcctgcacattgatcctgaagccaaagttgccgatatttccgtcggtatgcagcagcgggcggaaatattaaagaccctctaccggggcgccgacattctcatttttgacgagccgaccgcggtgctgaccccgcacgaaattcaagaactgattcagattatgaaaaatcttgtcaatgaaggaaaatcaatcatcctcatcacccacaaattaaaagagattatggaagtctgcgaccgtgtcaccatcatccggaaaggaaaaggcattacaacactcgatgtcgcacatacggatcaagatgaactggcaagccttatggtcggacgcgaagtgtcattcaagacggataaacaagcggccgagccgaaacaagaagtgctttcactttctgatgtaacggttaaggacgcgcgcggcgttgaggcggtcaaacagctctccctctcagtcagagccggtgaaatcgtcggcattgcgggcgttgacggaaacggccagtctgaattaattgaagccattacaggtctcagaaaaacgaatgccggcacgatcacgttaaacggcaaacagctgcaaaacatgccgcccaggaaagtcactgaagccggcatcgggcatattccgcaggacaggcataaacacgggctcgtccttgattttccgatcggagaaaatatcgtgctgcaaagttattaccaaaagccctactcttctttcggcatattaaataaacacacgatttatgacaaagcgcgaagcctgattgaagaatacgacgtcagaacacctgatgaatatacgcctgcgcgcgctctctccggggggaatcagcaaaaggccattatcggccgggaagtggacagaaatccggatcttttaattgcggcccagccgacgcggggactcgatgtcggcgcgattgaattcgtccataaaaagatcattgagcagcgtgacgccggtaaagcggtgcttctgttatcttttgaacttgatgaaataatgaatctcagcgatcgcatcgccgtcatctttgaaggcagcatcatcgcaaacgtcaatccgcttgaaacaaacgagcaggagctcggacttttaatggcgggaagtaagcaaatggaggcggggaaaacacatgattaatcgactttctcatctggctgtgccgctgattgcgatcatccttgggttagctgcgggtgcggtcatcatgctcgccagcggctacaatgtcgtaagcgggtattcggctctttggagcggcattttcggagaagtgtattacatcggggaatcgatccgccagattacgccatatattttgtccggattggccgtggcattcgcatttcggaccggcctgtttaatatcggggttgaaggacagctccttgtcggctggaccgccgcggtgtgggtcggcgcttcctttgacgcccccgcttacatccaccttccgctttcgttattggcggctgcggctgcgggcggcatttggggcctgattcccggatttttaaaagcccgtttttttgtccacgaagtgattgtcacgatcatgatgaattatatcgctcttcatttaaccaattatctcatttccgatgtcatgacggaccaccgggacaaaacagacaaaattcatgaaagcgcgtcgctccgctcgccgtttttagagcagctgacagattactcccgccttcactggggcattctgatcgctctgtttgcggcagtcctcatgtggtttatcattcataaaacaaaaagcggatttgaattccgggctgtcggctttaaccagcacgccgcacaatacgccggaatgagcgtcagaaaaaatatgatgtacgccatgatgatttccggcgccttcgcggggcttgccggcgcgatggaaggactcggaacctttcaatacgcggcggttaagggcgcctttaccggcgtcggcttcgacggcattgcggttgcgcttctcggcggcagcacggcaatcggcgttgttctggcggcatgtcttctcggcggccttaaagtcggggcattaaatatgccgattgaatccggggtgccttctgaagtcgttgacatcgtcatcgccattattattttgtttgtggcatcaagctacgccatccgtctcatccttgataaattgaagaaaaagggggcgaagtaagtggacttcctgcagattttatccattattgtcccggcaacactcgtatatgcggctccgcttattttaactgctctcggcggcgtgttttctgaaagatcgggagttgtcaacatcggtcttgaaggactgatgattatcggcgcctttacaagcgtcatgttcaacttatttttcggacgcgagcttggcgccgccgctccgtggctcgccttggctgcggctatgattgccggcggactgttctcactgattcacgcggccgccgcggtttctttccgcgccgatcagacggtaaccggtgtggcgatcaatatgctcgcgttaggagcgacactgtttatcgtcaagctgatctacggaaaggcgcagactgataaaatcccggagcccttttacaaaacgaacattcccgggttaagcgatattccggttttaggaaagattttcttttccgacgtatattatacgtcgattttagccatcgtactggcctttgtttcctggtttattttattcaaaacgccgttcggcctccgcatccgttctgtcggggaacatccgatggcggccgatacgatgggaatcaacgtgttcggcatgcgctatatcggcgtcatgatcagcgggctgttcggcgggctcggcggcggtgtatatgcttccacgatcgcgcttgatttcacgcactccaccatttccggacaaggctttatcgctcttgccgcgctggttttcggcaaatggcatccgatcggcgcgctcggggcggcgctgttcttcggatttgcgcagagtttgagcattatcggctcgcttttgcccctgttcaaagacattccgaatgtatacatgctgatggctccttacattctgaccattctcgcgcttgctggcttcatcggccgcgcggatgcgcctaaagccaacggcatcccttacattaaaggaaaacgctgattgccacaaaaaagagttccgcaccctggtgccggaactcttttcatctatatacgattctgatatactcacgcggctgaaacggtgtttgcattgattcagccgcactcagcttgtcttctgcgtattccgcaccgagaaaaaaacgctcccaattatctgcctccgtctgctgccgcgttttgcagaaatcgtccgctatgaatgttcctgcaataatagaacaaaatattccaatacaggccgccgcctttctcttcatctgaccagctccttttttaaaagcttgatctgaaagataaatgtatatacaaagatcaggatatttgataaatttattttgggttcaaaagaccacaaaaacacagagaggaatacattatgccgtagcagggtaaaaaaaagtgcgatataatttgtactgggtcctatgaccgtgaattgattaattcactcttacataaagcagttgcttgatgaaaaaacaagcaaaggaggtcttctgttgcagctgttacatttcgcgattttggcgccttttttatttgcatttatcgttccctttctttataaacgggtaaaacaagtccatacaggctggtttgtgctgatagtgcccgttgtgctgtttgtttactttatcagcaagctccctgtaacaatggctggggaaaccgtccgatatgcggccgaatggattccgtccctcggtattaactataccgtttatcttgacggactcgggctgttattcgctttattgattacgggcatcggctctttggtgacgctttacagtattttttacttatcgaaggacaaagaaaagctcggccccttttatgtgtacctgctgatgtttatgggcgcgatgctcggcgttgtgctcgtcgataacgttatcgtgctttatatgttctgggagctgacaagcctgtcatccttcttattaatcgggtattggcataagcggaagaaatcacgctacggtgcggaaaagtcactgctgattaccgtcggcggcgggctgtgcatgctcggcggctttatcctgctgtatctgatgacggattctttcagtatcagggaaatggtcaaccaggtgcatattatcgcaggccatccgttctttattccggcgatggttctcctgttattgggggcctttacgaaatcagcgcagtttccgttttatatctggctgcctgatgccatggaggcgccgactcctgtcagcgcctatctgcactcggctacaatggtgaaagcgggcatttatctgattgccagattcagtccggtttttgcattttcacccgtctggttttggacggttgcctcagtcggtctgatcacgatggtatgggcttcctttaatgcgatgaaacaaaccgatttaaaagcgattctggcattttccacagtcagccagctcggtatgattgtatcgatgctcggcgcaggagccgccgcgcttcattaccagcattcagagtattttacggcggctgtcaccgcggctgtgtttcacttaattaaccatgctacttttaaaggaagtttatttatggcggtcggcattatcgaccatgaaacgggaacacgggacatccgcaggctcggcggactgatggcgcttatgccggtaacgttcaccgtttcactgatcggaacgttttccatggcgggcctccctccgtttaacggctttttaagtaaagaaatgttctttacaagtatgctgcggattgctcatgcagatattttcagcctggatacgtggggcgtgctgttccccgttctcgcatggatcgggagcgtcttcactttcatctacagcatgaagctgtttttcagaacgttcagcggcgcgcgcaaacctgatcagcttgaaaagacgccgcatgaagcaccgctcggcatgctgatttcgccggtgattcttgccgcttgcgccgtcagtctgttttttgcaccgaacgttttgtcttacagcctgattgaaccggcgatgaactccatttatccggctctgttaaccggcggagatacattccatgtccatatttcccagtggcacggggtgacggctgaggtaatgatgaccctcggcatcatcattgtcggcacgatcggttacgtaacgctgtctaaatgggagcgtttgtacggtctgtttccgaaaaaactgacgctgaacaagctttacgatgcggtgacgggcagtatggaaaaaagatcttaccagctgacgtcatcttatatgaccggatttttgcgggattatctgctgtatatctttgcggcgtttatcattctcatcggaacggcgttcgtcacaaaaggcggcttttccatgacagcgaaaggcatggctgaaatcggcctgtatgaaatcgtgctgtccctcgttatggtgagcgcaacgattgcgactgtgttcgccaaatcgcggctgacggccattatctcactcggtgttgtcgggtacacactcgcgctgtttttcgtgattttcagagcgcccgatctggcgctcacgcagctcgtcattgagacgatatccgtcgccttgtttcttctttgtttttaccatctgccgaaaatgcggcggaaaaagaagacaagaacattccggatgaccaattttatcatttctctcggtgtcggcgtcatcgtgacaatgctcggaatcgcgtcttccagcgaaaaaacaaaagacagcatctcctcctttttcaccgcttacagccataagctcgggggaggaaacaatatcgtcaacgtcatcctcgttgatttcaggggatttgatacgatgtttgaaatcacggtgctgtcgattgccgcactcgggatttacggcatgatcagaacgaaagtaaaagaggagggagaagagcgttgagacagcaaaacacaaacgacatcatccttcaaacggcaacgaagcttgtatcttttatcattctgcttttctctttctatttatttttatcgggacataacgctcccggcggaggatttgtcggcggactgattacgtcttcggccatcgtgctgttgcttttggcctttgatttaaaaaccgtcaaatcgattttgcccgtcaattttatttatgtggcgggcgcgggtctgcttatcgcgattgcaacgggtgcaggttcgttcttattcggagcaccctttctcacccatacattcggccattttcatctcccggtgcttgggaatacggagcttgcgacggccactttgtttgatttaggtgtgtatctcgttgttgtcggcgtgacgatgaccattattcaaacgattggagaggaagaataatggaaatcttaatgtctgtcattgccggtattttgtttatggcggcaacctacctgctgctttctaaaagtctgctgcgcgtgattatcggcaccgcgcttttaagccacggcgtccatttgctgcttctgaccatgggcggactgaaaaaaggcgctcctcccatactgggcggaaaaagcacgtcgtttgtcgatccgctgccgcaggcactcatactgacggcgatcgttatttcgttcggcgtcacgtcctttttgcttgtgatggcgtttcgcgcctatcaggaactgaaaacggacgatatggatcgaatgaggggaaatgatcaacatgaataactttgtgatattgcctattctggtgccgctgcttgccgcagtgctgctgatttttatgaacaggcacgtgatgctgatgcggatattcagcactgccgcttcctgtgtctccatcgtcatcagcgccgctctcgttcagacggttttcacacacgggactcagacgctgacactcggcggctggaaagcgccgtacggcattgtgctcgccgcggatcagctcgccgcactgcttgttttgacaaccgccataatcgggctgctcgtcaccctgtactccttccgctccatcggagaaaaaagggagcgcgctttctattattcaggggtgcagtttcttctggccggcgtaagcggagcgtttttgacgggtgacctgttcaacatgtacgtcttttttgagcttctgcttatcgcgtcctacatgctgatcgtgcttggcggaacgaaaattcaattaagagaatcattgaagtatatcgtgtttaacattgtgtcatccgcgttttttgtcatcggcgtcggttacttatatgcggtgacgggcacgctgaatatggctgatctaagcgtaaaaataagtgaatcgggccagaccgggctgataaccgtcatcggcgtccttcttctcgtcgttttcggtttaaagggcgggatattcccgctgtatttctggatgccgggctcttattacgccccgccggctgcgatttcggccttattcgggtctcttttgacgaaagtcggcctgtacgccattttaagagtattcaccctgatctttattcacgatacgggctttacccaccaattgatgatgtggcttgcgatgctgacggtgctattcggcgtaatcggatctatcgccttttcggatgtcatgaaaatcgtcatctacaatattattacagccgtcggcgtgattttgttcggcattgccatgaacacgccggcctccattcaaggagcggtttattacttgattcacgatatgctgattaaaggagcgctgtttatgctcgccggcacgcttatcgcattgacgggcactgccagcctgcataaaatgggcggactgatcacccgttatccccttttaggatggatgttctttatttcagccatatctctggccggcatcccgccgttcagcggatttgtgggcaagctgaagatcgcggaaggcgggttcgataagggggaaacattgttttccgtattgattctcttatccagcctgcttgtgctctattccgtgctgaaggtttttacgacggctttttggggggaagaaaaagaaatccccggcgcaggcggacggtccgcaaaaggacttctttatccggcagccgcttttctccttttgtcgcttctgttcgggctcggaaccgaatgggtttcaccgtatgtcaatcagacggctgagaatctgctgaatccggaaaaatacattgaagctgttttgaaggagtagatggcatggcttttcaactattattaaatgttcttctcgctgtttgctggatgtttctcacaaacagcctcagcgcggcgggttttatgaccggatttatcgcgggcttggcggcgctgttttttttccggcgcttcttctcgcggccgttttatatttggaaaatatggtcagtcatcaaactggcgctgatctttataaaggaattatatttggccaatgtcagcgtgctgaaaaccgttatatcgccgaaactgaacatccgcccgggcattttcgcgtttaagacggaattgacggaggattgggagatcacgctgctctcgctgttaatcactttaacaccgggtacgctcgtgatggatatctccgatgaccggtcgattctctatatacacgccatggacattgaagatgcggagaaagcgatccatgacatccgcgtctcttttgagaaagccattcaggaggtgagccgctgatgtttacgtttattctgcaattatcactcggcattatggcggtttcgactcttctgtacgtcattcgcgtcataaaagggcctacgataccggaccgggtcgtcgcgcttgatgggatcggcattaatctgattgccatgaccgcgcttgtatccattctcttaaacacatcggcctttttggacatcattctgctgctcggcattttatcgtttatcggcacgattgcctttgctaagtttttggagaaaggagagattatcgaaaatgatcgaaatcgttaaatgggccgtcgccgtttgtattctgatgggatcgctgatctgcctggtcgcgtctttcggcacactcaggcttcctgatgtgtatacgcgcgcccacgcctcttcaaaaggctcgacactcggcgttaatttggtattgctcggggtgttaggctacttgtggatgctgaccggagaaatttctgtaaaaatactgctcggcatcatttttatcctgctgacggcgccggtcggagcgcacctcatatgcagggccgcgtacaattcgggagcggcgcttgataaaagaagcgttcaggatgattacaaagggatcagaaactttgtgatcaaacgtaaagaagattcatatttgtaaaaacaaacagccggacgattcagggttccggctgtttgtttattttgttataacagccagcgtgcagcgggaaacacagatcagcctttcccgttcatcgaaaatgttaatcccgtacacaatggttgccctgcctgtgtgaacgggttctgctattgccgtgaccgtcccgccctctttcacggattttaaatgattggcattaatctcaagcccgacacacgcctgtttcgaccggtcaataaaatgctgggccccgacacttgcaacagtctccgccagcgctgctgacgcgccaccatgcagatatccgaaaggctgcaccgtcctcttatccaccggcatcaccgccacgcatctctccggcgtattttcagtgatttcaataccgagtgcgccgagcaatgtattgttcagattcataggtcattctcccttcaagatttatagtacgttatctgacttggcgatcagcaccgcttcagtgcgggagccgacattcagcttgttaaaaatggatgtcaggctgtattcaattgaccgcttgcttaagtgaagcgcatctgcgatttcctgattggtcaaacctttttcgacctcttggagaatatggcgctctctcggggttaaccgatcctgctcactttgaggggaagaagacgtttttgttttttgctgggtcatcagctgtttgaaataggagaaatcaactaaaatctgtccgttgagcacgtgatatatgtattgcatgattttctctttagattcggttttgctgatggcgccgtgcaggcccgcgcggatggattcttcaaaataatcttcaacctcatagcctgtgtagacaatgattttacagagaggattctcttttaagattttcttggaaagctctatgccgctgatgtcatcacccagatttaaatccattaatatgagatcgtaagctgaaaaatcatgccggagaacgaattgttcactggcatcaggactgaggcaatcgacagaaagattcgtgtccgtttccagaatcgtcttggtgccctccatgacagccggatgatcatcaatcactagtatctttttcatggtttcctcccttttactcactcatttccattttattaaaaagacttggcttctgccaagtcgatttggtgataaattggttacaattccatttcaatatctactttaaaaccgtttccttcacttgtgtcgattttcatccgtccgtcaagcgcacggacgcgctccttaatacccgaaagacccatgctcatcgactggccgccgcctttttcctgattgcagccgacaccgtcgtcttcataatgcagaatcactttattttgaatgctgatcagcataatcagcacctcattcgcctgtgaatgcttcatggcgttcgaaagaaattcctgaataatgcggtacaaattcagctgcgtatccaaatccagcgccgccgtaaaccggcccgtattcagacggatatgaaacggcgcacgctcctgctgctgcgcggcaagcttggataccgccttgaccagacccaaatcatacagcagctgaggacgcagctcatggcacgtctcccgggtcatcaaaatgacatccgacatctgctcattcatctgatgaagcttgtcctgcacctctaactggcaaggctcttctttcttaaaatctgccagaaacagctcacactggcgcttcaaagaaatcaagtcctgcagcactgaatcatgcagatcacgggccaaatccgaacgctgcttttcctcgatcgtaaacatcagctttttgagccagaccgggtttgagccttgttgttttagatcttgtaaatggttcatgagttcttcgatctgtatcacgttttccatagagacactcgtatagaaagacaatgttttcagccatgaaatctcatcccgtgtcagtctcggtgtattaatggaggacaaacaaagcaaaacataagaacttcccccgcgttctcctatcttgattaagaaaccgcggtttagctcaatgatttttccaatctctgaagtaaccttcttaaattcttttgaatacatttcccaatcaggttcattatcccttttatcatgatataaaatgtcaccctcagaggtaacttcaaagacataagctttactgacaagtagaacatccagaatcgtcttttttagttctttaaacatttgttttaaagatgttatgcttctgataagctgagtatatttgaatatactatcttgataattaaatttttcagaaaaacgttttaaccgaaatttaaaatctattatttctttaaagtaaaatacagcaaacattacgataaagatgaaaacagtctgtctaataggattcatttgaagcgcatttgttcccgcccagaccgataaaactccgacaataactagcgttgggattacagccagtaaagtataatacctcattcttcctaatataaattctatatcaaatattttatttgcaacaaactgatatactaatccaaatgggataaggacaagcaatgaggctgatgccagtgctggaaatatataatcaccagttaaaatattaggtgcgacgtaaaaaagtaaaaatggagcaaaagaaagtgtatttgtcagaattaaaactttcaaaatataagcatgctctgaatatttatacttatataagtgatagaacacgagaacaaaacctgaaagagtaacgagaaaaaacgagataagattaaggtttgttataatgttttcaaaaggtaatttcttacggaaaaattccaaaataatattaaaaatcggaaatatatataagaaattgattagacgatttgcaaacttctttcctaattcctcaaaatattgttgtatgaactgaagataaaatataggagaagctataaatgtgaacaaattgacatacctgttaaatgaatgtcctctaaatggtcctcctgcgcttatataagcaattgaaatatctaacaaaaacaaaattaaaatgtatcccgcaaacgattttcttgtttgattcacctttagaatgtaaaatatacatactatacttaaaaaataaaacacaagtggaagaacgaatacaaaaaagctataggatttgtctaaattaacaatatcaaaatcatctaaatgaatttgctttccatttctgcttacatctaaacttttgatatgactaagattatctccttttaaaaatttagcagatggtttttctttgttgatttttagaatgatgtcacctttttctaaacctacgaatttcccgtaagtagtttctgacatctctattacttggaattgtttgtttttattttcaataacttttgtcccgattataatcccatttatgtttatatatgaaacatagcaaacataaacgaggcttaagataatgactgaaatagtgaattgtttaataaagtttttcacatattacaccaccgaacattcatcctttttcccattgctctatttttccatcgtttttcacaattgaagattcttcaaatgaattgattaatatttgggtaatacctgaatcatagcctaataaacttgcttcattgacttttaatttttttaacacttccggatatttcaatatataattgattaaatcctgcattatacttcaatccccctattaactacatattttttcaatttatctattttactggtttcaagatttagtatctctatagcattttcacatttttgcttatacaattggtgtaaaactgaaacatactgagtaacacctgcatcggttaatgtctgaataaaattgtttttatcagatataaacttaaggtgtgtttctctatgagaaaacatacgaaccaatttttcagaaggctcgttaaacagcctcttaaggtacaagttgattaacgtgtgtttatcttttaaaatatcactgcgtttagagctgaaaagagccagataatcactatatatctgttcaaacattcctttgtaataggaatacgtttcaacagtttcattatactttccagttgctaacatagtacctgccacattggatagagcgaatagactcccgcattttaatctaatgacctctaaactttcatcttctttctctggcttattgattatatcatcgtgttgtccttgcatagcgtcttgtgtatatttcagtatgtaagaaagaataaaaggattcatgttaattgaattaatcccctgcagccctgctgtgtataatgaaaaagctgcgcttaaagcttctgaacggtctatcttcatccaaagagcttgtttgttatcttcatcttcaagatcatcaataatatcggcggaaagcgtaagaatttcaattcccgccgcaagtttctcagcagtcttaaaatcccttccgccaaaaacttcataatgcaataaagcagattcagcaaaggttaaatattttctggattcaacaaacccaagaagaagctgtagtaaatgttgattaaatatgttttgctctattatactcttcattttattcttgatttggttggcatctaaacacatttgctcaataattgtcttcaccctcccattctattttactaaatgcaggtgatgaaagacagcaggtttttcgttttttaacaatcgtataatactttatccacgaaatggataaaaaatgcacaaaaaaaagacttgtttccaagtctttttaagaaattttcattgcatatgagaatttatcgagctgatcaatgcttttgttaatgtttcgtaatgagtcggttgtttctctgatatcattttcaagtcggaataataattgctttacttcttctaatttgttttccaccgtttccacactcctttttttgaaagatcaatgaattgtgtatggtgaacgagtcctaggtatttgatctgttactaatagtgtaaacgtttttgcgggatttttcaccgaaaagtatgtgtaaaagtatctgcgtgacaccgcaaaccgaggtaatcccatagtcccgaacggagcatttagcgaacaggactatataactaccagaaaggcagacgtttaggatgaagcaaaccaatctggcggttctgctgtttttttaacggttttccgacaaaccggcaaggactatagtccctgccgtcgcaatttcaaaacagaatgggcgaacagcgtcgcataaccaccgacaaacaccgaaaagaccgcaacccccgcattgtggtctttttgcatgtcataactcgttatcacgccgcctatactcatgtataaccaatgttttctcaggaaggaggccgccgtatgcattatgtgtatccatgctgtcctgttttcgccgcgccataccggcatcctgcgcccagtgccccggttcacgcagatattttgacagcgtccgcaaaagaggctgcgggcatgctggaggatgcgcgcctgctccttgcgcggctgtcggcgtcaaaagagcttgcgcgccgtattctcaccgcagcgcaatcatctgacaccgcagcggtcaagcggctcattaagcagaccggcatcaaaaatgactttgacgtgacgtataatcccgacggcatccgtgtcagtctgatcagagagcaaagccggtttaccatcgccctcaggtggtcggcttaaagcggctcaatccacgatcagctgccggcaccattcgatcgcctgtaagtaacattcatacgcttcttctttgttcagttcttttccccactcgtcacagtcccagttgttgcattcaatggctttgacgaacgcgagcatcttataataatcgttttcataaccgagcagcgcctgtccgacttcatcgattaaaggcagttctttgatgatatcctccagctccctgtggagaagcgtatcgatgagcgaaaacatgccgatcagcatgtaagaagagggctggggccttccggttcttttcgccagcagttcgcacagtttggccctgattaaggaaatcttaatgatttctttttggcttgagtggcttttcgccgttaaatctctgaatgaaagaatgtaaatcaagcgcttaatctcattcagcccaagcatcatgatggcctgctggatgctgtctatcttttttttcagccttgtttgcgatccgtttaaaaaacgcagaatctgatacgataagctgacgtcccgctctatgtattccgtcacgcgctgtatattgggctggtcattgtttaattcgcttaaaagctggtagtaagaatgaaaatgaaacgtcagatcatttccgctgatgacacgcggttcactgaaaaaatatccttgaaacaggtgaaagccgtctatggccgcctgtttataatcttttctcgtctccactttctccgctaaataaatcagacttttacagctgtacgtctgaatgatttttttgcgctccagacgcgaggattgcaaaaagtcgatttttaaaatatcaatatatttcatcagctgttccactaactcttcattttccggattgatggcgtaaaaatcatcaagtgctaatgtatatcctaatttcttcagctgtctgcatcttgagatgagtgccggagtgatcggtatgtcctcaagaatttcgataataagctggtcaggatcaaaggaggtagggagatctgaaaacatcaggctttctgtaaaattcacaaagcagcgtttcccctcagtcagcttttcgattccgatgttgataaagctgttaataatgagatccgtcgtagctttatctccatcagcggccgaataacggttctcttcgctctcccggtaaagaagttcataagcaacaacctgttcgtttctgttgaagataggctgtctcgcaacaaacaccttcattcatttacccccttagatgcggccttcgaacataagtatatcaaataacttgacgaaatttgtctaaatgtgaaaaatattatcacaacaaaaaggcctttccagagaaaggaaaggccgctttgtcttctattcaagttcccgtttcagcttgcttttgatttcatgaatccgctgcatcttgttgctccagcagtcttcgcttaaatcgaccggatattcttccggcttgctgatccgtttgtattcctcccacagaagtttgaggttatcctgcacgtattgctggatgtcggtaatttcgggattatcatagcataaaacgccgttttcaaaaatcggctcatgcaagtctttcgcatagaaatcagtgacgaatttgctgacgaacgtgtggacgggatggaacatttttaagcgtttctgatcatttacccgctcgtcataaagcgcgatataatcaccttccgagtggtgattcagcttgttgataatccggtatactctctttcttcccggcgttgtcactttttcagggtttgacgaaattttaatggtgtcagtcagtttgccgtcctcttcaatggcgacaagcttgtaaaccgcgccgagggccggctgatcgtatgcggtaatcagcttcgtgccgatgccccacgtatcgattttcgctccttgggatttcagatttaatatcgtgtgctcgtcaagatcgcttgaagcaatgacctttgcgtctgtgaaacccgcttcatcaagcatttcacgcgctttttttgacaggtacgccaagtccccgctgtccaggcggatgccgatgaagttgatccggtcgccgaattcctttgcgactttaatcgcattcggcatgcccgaacggatcgtatcgtacgtatctacgagaaacacgcagtctttgtgggtctccgcatatttcttaaatgccgtatattcatcgcggtacgcttgtacgagcgcatgagcgtgcgtgccggataccggtatattaaaacgctttccggctcttacattactcgtcgcgctgaagccgccgatcagagccgctctcgctccccacatagccgcatccatttcatgggcgcgccgcgttccgaattcgagggcgtcttcgtcaccgacaacgcctttaatgcgggccgctttcgtggcgattaatgtttggtaattcacaatgttaagcagagccgtctcaatcagctgggcttcgatcaggggcgcttcgacccgcataatcggttcgttgttaaaaacgagctcgccttctttcatgctgtaaagagatccggtaaaagaaagatcccgtaaatactcaatgaaatcatcagcatagtgcaattccgtttttaaataattcagatcgctgtcggtaaatttgaagttctccaagtattcgattgctttttctaagcccgcaaataccgcatagccgttttcaaagggaagctttctgaaaaaaagctcaaaaatcgcttttttctcatgaatgccgtctctccagtacgtttcggccatattaatttgataaagatctgtatgtaaagacaaactgtcgtctttaaaaccatgctccaccaaaattgttttccccttccttactctgccacttgcgctccgatgctgttcttaaaatgggacagggcccattcatgcccttccggattaaagctggccacagcgttttgatgaatgacgatctgaaagcccttgttgtaggcgtcaaccgccgtgtgaagaacgcagatgtccgtgcacaggcccgcaagatgcagctcagtgatctgccgttcccgcagtttcagctctaaatccgttcccgcaaaagcagaatatctcgttttttccatataatttacgttttttgcgtgtttatgtttctcataaagaggcgatagccttccgtacagctctttgccctccgtgccgttgatattatgcggaggaaacaggcgtgtctcgggatgaaagtcatcgtctgcatcatgcgaatcaaccgcaaagacaacgtaatcaccgttttctataaatgcttgcgtcaaactgacaatcgtatcttcaatctgtctcgcgggttctccgcaggttaatgccccgttctctgctgcaaaatcattcgtataatcaatgcatataaatgcttttttcatagccggcctccccgccattcatatgaaaaccattatatcctatctccacttgtaagtgaattggcattgtaaaatgacaaacggtgttttgcccttttaagatttcaggagtgagcgctgaaaaatgtcatcctgtacgtaaatgccgtcaaggttcacggcataatcggcggcaaaaaccaggccgagcggcgtttcgaattgaagatccgatatgacggagcttcggacaccggcaagtgcggcaagcttcatatatggtgaataagcatgatacgggagccttccgtttatatagagcaccgcgtcttttcggcttttcagcgcctgtttcacttcttcatacggctgcttttgcagcacctgccccttcgtcagggcaatgatgactctttcacgcagcgagcctaaaaataaatggcgttcatccggtttcgtctgcagagggccgtacatcccctgctgtaaataaagatcaaccgttttgtcgctcatcggcctgtccctcctcagcttgttttacaattatctccccggacgggacgcggtaaaccgcttcgttacatttcagccacccaatgggagatcttgccggcgagctctccggcgggttcttcttcaatcagcttgctgaatgattgtaaaagccgctgcgccagcgcctttttctcttcctcataggaaatgatcgtgctccactcaagttccggaacggctacaagggtatgctgttcttttttattttcatgcagatatacatcaccgatcattccggactgcacggtaatatttgcttttctgattttcataaaaaattccccttttataaagactgattctattatactacaaaaaagcgacagcctcctaaaaggaggctgtcacgcgttaaaccaatcaggttcgtcaaacacatcgatgtcttcaaagcgcgttttgctgaatttattagtaactttgacaaaatctccggaatgaaacgcccctgcccccgcgcctgagtggtcaacggctttgggagaaatggcaaacacgtcaccgaagctcgccgcagcgtctccggctaaactcataatataaatcggtcccacaattgcaggcatacccacacctccgcttttctttacagcattttatgcgctgcatcgggagttgtgcccgtttttatttcggcttgcggctgtcttcgagctttgaccgctgacgaagtttgataagccggacgatatttaagacgaaagcttttaaaaccgcgtaaaccggcacggccagaatcattgcgagaatgccgccgaaactgcccgctccgataagcagaagaataatggtgagcgggtgggtattgagccgtttcccgatgacaagcggagaaagcaggttcccgtcaagctgctggacgacaacgacaacaataacggcaaacagcgccttagccggcgaatccataaacgcgataatcaccgcgggcgccgccccgagaaacggccccaggtacggaataatattggtgacggcgatcaccatcccgagaattaacgcatactgcaggccgatgatccaatatccgataaagcatgccgttccgacaaagagacaaatcagcagctggccttggaaataggcggccaatgtgacatataagtcattaaatattttgcgaccttccgcccggtaggaagtaggcaggattttaaccgccaagagcggaaaccgccggccgtccttcagcatataaaacaaaatgaacggaacggtgatcacgacaagcgtgatattcgtaacgacgccgaacacggccgacaggcttgccgtaatattttgcggaaggctttgtaaaaatcccgtcagagactgctggattttttctatcgacacataatcctgcgtcatcatccacgtaaaccatttggaatgggataattgcgccgtcaaggcttgaatctgatgaatgtaatcagggaaattgttaatcagccccgtgacctgggaagccacaatcggtccgatggcggtgaacataaaggcaatcaggccgatgaaaacgagataaatgagcaggatcgccaatgtccgggggatttttttctcaagcaggcgcacgatcggattaaaaatgaaaaacaaaatgcccgagatcaaaatcggaaaaaacagcgtggtgataaaaccgaaaaacggctgaaaaataaacgaaactttcgttgatacgtaaataatgagcaaaacgagcaaaatttgcagcgtccaaaaatggacctttgatttcaacaagcggtttcctcctattgtcatgtgaacttgtactgtgattgtaccaaaaaaagccgccgtgcatctatgtatctcaaaaaagaagacgcaccggggttctatagggccgcctccggtttgcgccttattcgtgctgttacacgcgttcggtataatcaggcatgacggaaaccacatggcggtttctgatataaaatacacggtcatgcgtttcttcaatggcgatgtgatccggagtggcatcaatcagccgtcctctgacaatgcgtctgacggtttgaatgataaaccttgagccgataagtttatggatggtctgataaacgtaagggtccactaacgagacgatttgcgggcttccttgatgggccattttcgctgatcccctttactatgttttccttcagcatatgcaacggacaaaggctttgacacagtacgtctatcggagcggaaaaggtgttagtgagcatgcggagttatgtaagcggaaaaggccgcatgagtggcctagactgagcttcttatgggatattgggcttggtcaattaactgatcaagcttttggatttgtttgagcgcggccgtgtgatccatttggcggtaatggtgatgcccgccgggttcttcatcgagttcatctgcttgtttcacgatttgctggagcgtattcttgtccagttcgccttcaggcagataggaatcggtgtgaagcagaatcgccagcgcaatgtccttcgccgctttcggttcttcaccgagccggatgagcagcttatgcgcccgttccgcgcctttaatggcatggatatcgtttcttctgtacttttcataatcccatttgccgtctgtgtaccattcataatggccgacgtcatgcagtaaagccgctttcgccgcaagatccgggctgacacctgcttttacggcaagacggtatgcatgaaacgcgcaggcgatcgcatgggcgacaccggaacgctgtaaatacttttgtgcgattggatgggtgaagacatccattaacgttacatttctcatggaaacccctccttatttatatttttagaatcctaacataaatcgagaagaaactcaattcatctgatacatttcttataccccttatacgttgtttcattcatcatatgccgccggaccccgaagtgattgtacaaacaaaaaagagcagcgtaaaagctgctctacaaaaattctttgatatcgtatatccgtccgttttccggctcgcccgcgatcagtgagtgaatgacgccggcgatgtattcaggacttctgaggtttttcgtttctttcagattgcggaaccgctcgatgtcatggaaatcttcttttgacgaagaacggatgacggcctgcatgtctgtatccatcactcccggcgagaatgagatcatgcggaccggcagctcttcatcttcctgttcaaacccgaatgttctcgtaaacatatcaagccccgcttttgagctgcaatacgcgctccatcctttataaggatttttcgccgcgccagatgtgatgttgacaattgttttgctgccgctgaacgcttcgaaacgctttgtgaacatttggctgagcaaaacgggcgccgtcagattaagggtgtaatggcggttcaattcttcggcggaagcctctttcgcccgcttgatcggttccaccattccggcattgttgatcagtgtgacggcggagtaccccttctcctctgcttgatcaagaatcgccttcatctgccgctctgtatctgccagatcggttaaatcaacactgtattctgtcagcccctcacgcttttccccgcttatcgttcttgaaagcgcggcgacttcggctccttcttgcagcgcctgttccgtcagcgcccggcccaagccttttgacgcgcctgttataagaaaaaactgcatgaaactcctcctttttttcttattttacgggctgtcttcccgcaaacacaagcgatccgtttaccgctttgccttttcctgcgccgtgactttcgggatcaaatagatcatcgccgcaatcccgaggaggatcaagacggcataaatgacaggcagcagataagaagtctttttctcctccgtttccatatctgccgaggtatgccgcaccgcaggctcggcaaatgtgatacccagttttttcgattgcgctttgatcgtattcggctccgtgtctgacgatgtaaacaattttgatatcagtttgtcatccgggttttcggccggctgatcaaaggtaatatccttctgttctttcggaagcgtcgttttttcctcggagtaggcatcgtcgtgcaggtaatccgtacgaatttcaatgtctttcttttcatattcattcggcttgacatcagtattttcctcattcgcggctgcggcttggggaaggaaaaggaaaaaggagagagcaaacagcagcaatcctttttccatgaacgtgttacgcctcataagactgatcactttcctccgttttttccgcaaacagccgaatgacgagcggaagcgccgccgcaatcagcgtaatgatcgcaagaaccgttacccccatcgcaaacagatggcccgttccgtattgaatatcgatatagactttcgaaaccggactgtcaaaggtgaagttcggcataatcaggtcgatcaaaggcgccacataaaagagaatgagcgcggatgatgcaatccatccgatgattgagctgaagacaaaggctgcccggataaaagctgaacccgccgcaagcaagagaatcgtaaagactgaccatttaatcgtctgatcgtccggaagcgagtagatattcagaccgaacagactgatcatcaatccgaccataatgtttaaaatcccaaagagcgcgcctttgacaagaagcggcgcctgctgataatacgagctgaaatagccgatcagaagactgctgatcaggacgatcaccaaaatgacaaccggcggaacattctgaacccggtcttccggcacctctccgctgattttaagcgggttggcgagataatcgtaaacatagccgttttcctgtccgtcaacgagcgcgttccctaaaatgccgtacacgtcatttctgatcaatttcgtggaatcgacgtttttgccccagttgctgttcagggtgtccgctttatgctggacgtcatttacgctttgctgcatattgtcggtatagctgatgatgccggactggcgttctgacagatggcccatcgtgtcagacatttgcaggacttcgcggccgacggtatcctgagcgccgagcgccatcgttccggttaatccgtctccgctgaacgcggccgcttcctgcacggcgccttcagccagctgatcggatgctttcgccgcgctgtctgaaatgctggcgagctcatcgagcactccggcttgttcatctctgatataggtactgtagttatccgagaattcggtcatgcctttaatgaaattgctgatgtcttcatctgtctgcatcttgttgtttttcaggttttcccagcttgccgtttccaccggtttgatggcaagaacggtttggacttcgccttgctgggctttcagcaccctgtttttcacatcaggcagcgagcccgcgtcaagagagtgataaagtgtcgcctcatacagggataaatcattatagtaactcattaaatcggatatttcttttgtattgatgtcagcggcaaatatctgttcaagagcagatttgcggccgctatccaatgacgggtagttcaaaatgttctgttctgttcttacaatcaatctgtaaacggtattgaagtcttgttttctcgtttctttcaattcctctagctttttctttgcacgttttttgacgtcatcaatctggtcttgaaggccttggatttcttcatcaagagcatcgagacgttttttcagttcttcattatgagtctgctgtttctcttccagctctttttcaatttgctgaatgcgctctgcggcttggttcagcctttctttcgcctcagatatgtccgtgccgccgtccccttcagaatcgtttggatcgtccgccggctcatcagcaggcggagtgacatttttagcggcagtggcggtctggacggtttttggctcctgatcgcctgtgttatcggaagcaggctgctcttcttttgtgccgtcttccgtttttccgtcttctccgggattcgttccgttatccggatcggtatcgccggagttttcaccgtcatcgccttggcccggtttttcaggggccggattttcttcttccggttcttttaatccgtcagaaatgtgattgatttcagcggagatgcgctttaattcgtcacgctgatcatcaaggtcaattttcagatcaccgggtttttcttcttccggtttttcttcttctttcggttcatccgagccgtcatcacccgggtccttttccggaacggttaatgccggccgatcccttttcataagggtttggatactgttcagtgtttcaaatcttgcttgagctttatattgagtcaaataattgtccagtaaattggattgaatattcgccatcccgtgttcctgatcaggaacctgcgcttctctcacctgttgggcggcaaaaagagccgatcccgtctggtcaagctgtgtctgcgcccggtttatgcctgaagacagcccgctcatcatcgtgctgaactggttggcggcctgctgtgctttaatggcgttcagtccggctgtgatttgcttttgattttgttcctgcgcggccatcagcagttttttctgattttcttgatattgtttatagcgctcgaccgtgtcggcaaagtctttaagcgtggttttggcttcatctgccgaagtcaatttttcttttgccgcgccctgcgcttcattcattgattttttcagttcgtcaatcaggtctttttgccgtttgatttcacctgccaagtcattggagctcggcttgtaaaagttgtacatgacgttttgaaactctgattctttattgacgatcttgtcaaaatcgcctcggacattgttcactttttgtgagacgaaattccaatataatgccgacatttttttattcattgatttttgggcgtcttctagctcacgctgcaccttttctttgttgacggcgttcaggttgctttgaatattgaatgtcagcgtggctttttgcggacgctccttgtcatagcttaagatgtcttttgaaaaatcggatggaatgtaaacgacggcgtcatacttcttagccgccagaccgttttcagccgcgctcctgttgacaaccgtccatgaataatccggacggccgccgagagcggccgctacttctttgccgaaatggacggattcctcttcctcattttcatctgtttgtcccatgtcttcattcacgactgcgatttggcgggtggcgttgattttttgttttcccgggtcatcgccgataaaccggaaaaacagcaccggcagcagcagaatgatgacgaccgcggctattaatttgatcaggctttttcgttgttcagtcatctgacggcctccctttccgctgaacataaaggtatttggattttttgctccttcccgttttcaaccaaatagccgaagcccggctgaatgtccggttcctgcctttggtaaggcagcggaatgacattttgttcggattttttcacaagcagcatcgcgtggcggatctgtttcatttccgtcgttaaggaatcatagccttttgagaattcgctgtgattgcccgccgggataaaactgaagcccacatgcgcgtacgatttcataaacatcgccagtttgtcctgaatggcggtgtcgatcgtctgctggaatcttgtaataccgtcggccattaacacgaccggagagaaactgagtttgtgcacatcgccatttttgacggcctgcgcatactgagcttcgcgctccgtgaaaatggcttctgccgtttcgatccactgctggacgtcttcttttgtatccagatagttgacctttgtttcctgcgcatactgcgacagtccgcggtcaatcgagtcaaacagcccgacccgttccgtaccttcacgcagcaggtgattcagcatcactttcagaatgtttgtttttccacgctgtgtctggcccaaaataagacaatgcttatttttgcccagatcaaagtacacagggctgaccttttcctcatgaagcccgacaggaatgcggaacggttcttgatccgggccgagacggagtgaaaattcgccggccgtcagcctatccggaagcatcggaatcgggtctgggccggctgttccggcgtggcgctcagctaatgctttgacatcggctttcagcgcctggaacatctcgaggtcattttccgcttcagccggaagaaacatttgcgcgaaatacagttcttctttttggatcatgacgcggcccgggatcggttcgagactgaacggcggacgcccgtaaatggagtatccttctgactgatccattaaataatggacgactttcgtttttatgttgtttaacagcgactggcggacggcgtttactctcgttgcggtcagcaggaagtaaatgcctaagctttgcccgtcgcgtgaaatctggataaattccgtttctaattcatgcatttcatcttttacgatgtcgaaattgtcaattgtgataaatataaacggcagctcttcttcactgagcgaattgtacattttgatatggctgacttctttttctctgaacagccgtttccgccgctcgatttcttccttgatgcggatcatgaatttttcgatctttctcatttgatccattaagaaataatctgcggtgtgcggaagctttgccaatggcaaaagcgtgccgtttccgaagtcaaagatgtacatatgaagctcttccggcgtgtacccttccgcgaagttcatcaggaaggtgatggcagccactgacttgccgtagccggatgagccgaaaatgccgatgttgccgtcatccatcatcgtataagcgagaggcgcctgtctttgctgatcaggctcatcaacgcaggcgatgaagaagcggtctttttcctgcgcggggtaaagcgtgcgcgggatacgttcggcaagcggcggaagccacgggctcggcagcttttcaatgcccatttcattttgaatccgctcgatttcttcgactacggcttctatttctgccggggcgtcttttttcgccgcatcatccgcatccacctcagacagcggaattaagccggtgtcggtaacgatggcaatgtcatcctcggtgccgtatacatcttccatgtaaggggcgccgctccaggcagactggaactgctcatacacttcgttatttccgacttgcaagtagccgcgtccggtgaccgtaatattcgccgcatcactgtttttcaggatttctttactgtcacttgcatcctgcactttcagcgcgaccttaaagcgtgagttgctccatatttggtcgtcaatgatgccgcccggcttttgcgtggcgagaattaaatgcacaccaaggctccgtccgatgcgggccgcgctgacaagctccctgataaagtcaggctcttcgcttttcagctcggcgaattcatctgaaatcaaaaacaggtgcggcatcggaatatccgtttctccctgtttatacagctttgtatagtcattgatgtgattgacgcgatattgatcaaacagccgctgccgttttttcagctcgcttttaatggatgcaagcgccctgatactgaagtttctgcttccttcaatattcgtgatggtcccgagaaggtgcggcatcttgcggaacggctgggccatacctccgcccttatagtcaatcagcaaaaacgccgcttcatgcgggtgaaagtgaacggccaatgacaggatgtacgtttgcagaaattcacttttcccggagccggtcgttcccgccagcaatccgtgcggcccgtgcgctttttcatgcaggtttaaatagacgatgtcgtcttttcctttatagccgatcggaacagccagcgattttgcagactcacttgtctcccacttctgcctgatgccgatttcttttacttccttcgcatgaaacagctccagaaatgagaccgtttcaggaatggaattcgtcattccgacctgatggtgcaatgtccgaagcgtccgggaaaaccgctcgttgtttgtccgttcatgcctgtccagcttaaacgggatctgcaccgcttttttctgctgaatgagaatgtctccctcatcttcattaatgtagcggacgagggtgtgaatgttttccgccaggctttccttcgtttccgcggcgatgattgccgagatgccgagatgctcatgccggccttcgatgtattctaaaatgacgtgctctgcgatcagctgctgatttgtgatgacaaagacaaaatgcggctggaagatcttcttttctttatcttcttccaaatcccgctcccgcagcagctcgtaaatggacgataacaattgatcgcgggtctgttcattgtaaataaatcctttcgcgtacatatgaggcagctgaaattgcggcagccacttcatccattcccattccttatattcgtcctcatgaaagataaagacaaatcgcaggtcatggtagctgttgaagaacgcgagctggccgatcagctgatgaatttcatttttgacgatctggggtttcccgacaagccccatcggcccttcttgtaaatcaacggtcacgggcgcatggcggatatctttatacacacgctgcatgtgctgcgactgctccatcaagtcatccacatcacggttcgccaggtctccgccgctcattgaaatctcgtagcttgccgggaccgtgcccgttccgagccgaagcatcagaaaatccctgctttccagcgatttctcccaaatgcggccgctgatttcagaagttaaatatttcattttttcaaacgggggaaaatgatgcgtcagcacttgcagctgtttttccgacagcgtctgaagctctttccgcttgctttctaaatactgcttgtacacacgctcccgtttttcctcccgttttttccgctggtttttttcacggaaatactgcacggtggacgtaatgagagtcatcataaacatcgccaaagagacaaggatgaatatgcccctcggctgtataatggcgacaacccccattacaaccagcatgaccaaaggaggcagaatgacgagccacagcccccggttattctgttcgctttcctgcgagggaaagctgaatgaaacgcggtcttctggaagatcgtagaccatgcgcggcgttcttcgatattgcgggtatttctttttcatttcggtgcttggttttaccgttttggttaaaccggtttgaagcttttcgtgatgaacgacttctaaaaggtcgtcctccgtcagcctcacacgcagaaaattccacagcagctcatctcccgtccggagcctttcgggagcttctgcaagtattccgttcacataaacgtcctggccatcagggacgacagaccagcatcctcccgactttcgcagataaaaagcccctgtttgagcggaggacggctctttgtatatatccgcttcctctgtttctgatgagaaaacgatctcatccttcccgccgataaaataaacggaggattcttctttgtcaggggtgagcagaagccgcatcgtctcttcttcaatccggcagggcatttcatttcctattgtcaattcgccggcacagttatttcccaggaaaacatcataacgatctgtttcttttcgataaagggttgcggcgttttgccgtaacggaagtgtgccgaccgtgattgtatctttcatatccggaccgatcgtaatcggctgagacggcgggagttcagacagctgaatcttttgtacgtgctctcggtaaaagacccataacagactcatatggcgaacctcctgacagcctgatcgttacctgcggccatttgatgtgtgctgttattttttttcatcttttttctcatctttcttgtcgttctctttgttatctttcgctttgtcttgtttgctttcatcctgtccggcggaagcttcggcggtgtcaccgttttcctccgcttctttatgctgctcctccgcctcttttttcgccttcgcaagctcgctttccacggcgtccagttctttctgcttttcgtcgtctttcatactgtcatccgctaataattgctgtttatattttgtaagtccgagccagatgtacgggttgtactcaagattgcggccgattttgatggcttcttcattttcccctctgccgatatcaatccaataaaggaaatgcttcgggtctgattgcagcgtgaccagattcccgatgtttttccgctgctcttccctcagattttcaactgccacataagaagaagcaagctcgtactgcacagattccgggaggctttccgcatcgtatttggcgagtgtgtcaatgactttgctgtactgctgatttaaaaaatagcggttgctttccgtaattgcctcttgctttggctgggcgaaaaacagaacgtataaggagtaaagaagtgtcggcacaaggaggacggcaagcgccagaccggcgtatctttggattttccatttctttttcggcagttttatgtatgtcttgtccctttcttcgagggaatcaattgcggtttgaatggtttcttccagttcttcaatcgtctccgcctctagcacgcttttcacctcaggagagaagtgaagcgtctccttgtacttcaaatattcatcgaaggtgtacgccccgtcagctgcaagcgccgcacaggctttgagctcttttaacaccctttctctatcttcctcataaggcggaaggctctcctttacgccgtaatgaagaaagtaaggcgtcagcgctttatcaaacacgatattttcaggggcggcaatcagattgagacgtttcagcttatgctgtttcacggcttggacgagacggtaggcaaattgccacctgctttttttatcttttccttttatatagcggaaagcctgataagaagaaggaggtttgattgtgatggttacttcgtcttctgaaactgagacctctttttgaaaaaaaggatcagcatctttaatcacgtttgcttccagcccgtcaagaagcttgattttttcccgctggaaggtgaacgtgaagcctgattcggtttcttctcggacggcgtctaattctgtttctaaataagatctgttatgacctgtcattccaccatgtcctttcataaaatttcaaggcggtctccgttcgtaatgccgcagtcagatagcttttgttctccggaaaaaaccgcttctttattgaccactctgatccaatagccttcacgcggcggaacggatacatgctgagcctgccgggcaatatcaatgacttttttcacagaatggtaatctgacaatctgagatcgaagacgctgccgttataatgtgttaaatctattgtaatatcgatatacatattcatatcacccttacatagaaagagcgccgtcttcttgattgaatcaggcgctccgtttcttcattcatcttattatccgcgaatttggttagcgatatcttggtcagtagactcaagcgtatttgccgtttgatcgagctgatgattcacatcttgaagcaattcagacattttaataaatgaaggtttcagctgctcatattgatctgcaaaggcttcacttgaagcaccttcccacatgcctttcaaatcagaaatcatgcggttcaggcggtcaacctgattcatgacttcctgactttcaacgccatattgcttagccatcgctcttagctcttcgggtgtgacacgaattaatccagacatactccttataccctcctgtgtcatcagcctaaatatgggctaattcacttattttttgaacgtcattattataaaaacaaccattcggcacagtcaaacaaatctgttttaattttacaaaatgagtcttatgatatattggatttttcgtcacatttacacattttgtaaatatagtagtatgattttcttattattttcgttttcatcgaatgatcttattgtcctagtctatttccctgcaaagatgcctttcagtctgaaaagcaagatggtaagatcaagatatgaagctatgaaaaagtagggatacagatgaccaatccaaaggatccatttaagtacagtttcgacaggcttgaagatgttgccgaccatatcagtgaagttcttcaatgccccattacaatagaagacgttaatcataaactgcttgcatacagcacgcacagcgattgtacagatccggcccggacgtcgacgattatcgggcggagggtgccggaaaaagtcatcaacaaactctggaaagacggaaccattccggcccttttaaaaacggaccagccgatcaaagtgaaagaaatcgacgaggtgggcctgagcaaccgcgtggcgatttccatctggaaaaacagtcaggttctcggatttatttgggcgcttgagatcaaaaaaaagctcaatgacgaagatctgaagacacttcagctggcagccaaagcggtgcggaacaagcttttgcacctgcagatccgcaaaacgaaaatcgaagagcggggccaggagtttttttggaaaatgctgaccggccatatttatcaggaagccgaaatggccgaagggtttcataagctcgggatggcgctgccgtccgtgttcagcgtcatgatcatccgtttacatgatgagctgactgaaaagacggaacagcagctgcaatatttgcaggaaacgacacagcagattcatgtcatgctggcgactgttgattcaaatgaattaatcttattagccgcgccgaaaaccgatcagccttttaaagatgtaaagcacttcgcccttcatattcaaaaacagctgaaggaacgatataaaattgaggatgcgtcgattgcggtcggcggtatttacgaatcgatttcttatgtttaccgctcctatcaggaagcgctttccgtattaaaagcgaaagagcggtttgtgagagaaaccaaacaccttttcagcttttcggaactcggcatttatcagtacctggatgtgttggatgaaaaacgcaagcacagcggctatatgaactattccctctcaaagcttgagcagtatgacagggagcaccaagccgatatggtaaaaacgctcgaacattttattgatgccgacagcaacgtcaacaccgccgctaaagcgcttaacatccatgtcaatacattgaattacaggctgaaaagaatcagccagatcgcagaaatcgacttaaaaaatgtgaatgaaaagtttacgatttaccttgatatcaaacttcgcagcatgggttcgtgaaatttcacaaatccgtgtttttttattttctgtttcaaacaaagaattttcgcaaaaatcgcgctacacttgaaacatcacacaaacattgggggaaacagacatgattatcggggttccaaaggaaatcaaaaacaatgaaaatcgagtggctttaacacctggaggcgtttcacagcttatcggaaacggccatcgggttcttgtggaatccggagcgggactcggaagcggctttacaaatgaagattatgtatcagcaggggcggaaattctggaggacagaaagcaagtatgggatgcggaaatggtcatgaaggtaaaagaaccgctggctgaagagtatgcgtatttccgtcaaggtctggtcttattcacttaccttcatttagctgcagagccggaattagctaaagcgcttacagaaaaaggcgtgacagctatcgcgtacgaaacggtaacggacggacgttcccttccgctgcttacgccgatgtccgaagtggccggcagaatggccgcgcagatcggggctcagtttcttgaaaaaccaaagggcggaaaaggaattttattagccggcgtaccgggtgtatcccgcggaaaagtcacgatcatcggagggggcggcgtcggaacaaatgccgcgaaaatggctgtcggactcggtgccgatgtgacaatgatcgatttgaacgcagaccgcctgcgtcagcttgatgatattttcgggcatcagattaaaacattgatgtcaaaccctgtaaatattgcagattccgtcgcggaagcggatcttctgatctgcgccgtgctcatcccgggagccaaagcgccgactctcgttacggaagaaatggttaaacaaatgaaaccgggttccgtcattgttgatgttgccatcgatcagggcggcattgtggaaaccgttgatcatattacaacccacgataatccgacttacgaaaaacacggcgtcgttcactacgctgtcgccaatatgccgggcgccgtaccgcgtacgtctacgctcgcattaacgaatgtaaccgttccttacgcgcttcaaatcgccaataaaggcgcggcacaagccattgcagacagccctgcgcttaaagcgggcttaaatacggctaacggacatgtcacgtatgaagcggtagccaaagacttaggctatgactacgtgcctgctgaaaaagcaatgcaaggttcggctgcaaaagcttaatagatatgaagaggacagcctgatcagcgggctgtccttttttctttctcataaaaggaaaaacggccccctgtctcgaatatcaattcatatcccggaagaaaaaggaggattcatatggctgttcagcactatggtgtattaaaaggcactgtgtcagatatgaaaagggaaacagatgatgattctccgcattttcaagtcgaggtgctaggcgagcctgatacgcgctatcgctgtgcgatcaatgtcatgtcaagttcaaaagaatcagaggttctgtatgcggcacgcgatcattttgacgcaagcgcgatcaccctgctgcccaacattccgtatggatataccccaattgatgaaaccagccgtgagctggcgctggattatgtccgcggcggattgtttgatccccggaacatggtgcccctcccgcatgaagtcaccggtccggataatgacttaaatgactttattgagacgtacatgcaaaaagcgaaatcagaaaaagccaccgtctatatttacggctctaaattcgggccggagccgggcgctgataagattttcgggttcaagccgacaaacggcatgcataatattcatatgaatcagggaaacccaattgatacacgctggaagaaggataacggaacgtggcacgacggcggtattttaatccagtttgcagaccagtgggccgcggtctttttggcttttctgtctcagtcatggtgcacgaatgaagaaggccacccttatacattttgtgatcatacacagcttaacggctgatgtccgcataaaaagcctgccgaaataacggcaggcttttcttattacattttagcggcttcggcctgtttcaggctttccggcctcatatcacgccagtttgtttcaatatattcgagacaaactgggcgggtttcattcgtgaggcgggtttcccagccgtccggcacatccagataggccggccacagtgagtactggccttcagcattgacgagcacatggtatgagccgtcttcccgttcaaatggatttgtcatatcatctctttcctttctttaccggactgtacgccgtccgtttaatttctctgccagaatcgcgccgatgtcggcaagcgggcccggctggcacatatctttatggcggcagtctaagtcataccgctcgatttcccccgtaatatacggtttccaagtatccggctcaatcgggtcaaaccactccggaataattgtggatctgaagaacagcacatctccgtggaacggcttcggcttgtatgttcctaacagcccgacagaattaatgtacgtgtctttcagattcatcatcactgactcgtccaggctggctaatgcgcttccctcacggcggagaatggtcagcgcggtgtcaaaatcaagcggctgatccccgaggctgtccgggtcgtaccctcccagggcaagcagcgcgatgacggcttcctcgtcatcaggcgcattttttatcggcagaaaatgattcggatacgcgtcaagcatcaccaaaagcgaaacctcttcaccccggctctgtaattgtgtcgccatggcctgaatgacattccctccaagagaccagccgagcagacggtacggccctttcggctgcacggtgcggattttttcaatataatccgccgccatgtcatctaagctttgcggaagcggttctttttttccgatgcctctcgcctgtaagccgtatatcggataatcagcctctaaagaagacatcagcccggcataacaccagctgagaccgccggccggatggacacagaacaacggtgtttcttctcctgccgttctgagcggaagaagaacatcaagcgcgcttgcgcccgttcctgactcaagtctttcagcaaggcttgccacagtaggagcttcaaataatgttccgatactcagctcggctcccattgcttcccgaatacggctcattaaatgaaccgcaagcaaagaatggccgcctaaatcaaaaaatctgtcatcaataccgacacgcggcaggtgaagcacctctgcgaacagctcacacagcatttcttcctgcggcgttctcggtccccggccggtgacctccgtttggaagtcaggcgcagggagcgcttttcggtcaagttttccattcggtgtcagcggcagttcattcatttggacaaaagctgacggaaccatgtaatccggcaggctttcttcggcaaaccggcgcatgtttcctgtgtccaaggtgctgccggcagatcggacaaggtaggcggccagccgtttatctcccggccggtcttcacggacgactacggcggcatcctcgacatccggatgtttgacgagaaccgcttcgatttctcccaattcaatccggaagccgcggattttaatctggtggtccgccctgcccatataatcaagagaaccgtccgtccgcagacgggctaaatcccccgtccggtacattctcgttcccggcgggccgtacggatcagccacaaagcgttcggcggtcagactttgccgccctaagtagcctcgtgccacgccccctccggccacatacatttcacccgtgatgcccggaggcacaggctccagccggtcatcaagcacatatacgttcagatcaggaatgccgcagccgatgaggctgtttgctctcagttcggcaatgtttttgtctaattcaaggtaactgacgtgcaccgtcgtttccgtaatgccgtacatgttcacgagcaccggctgattgtccgcgtggcggctgtaccaaccctcaagccggctcagctcaagcgcctcgccgccgaagatgatatatctgagtgcgagctgacgcccaagctctttgtgttctttttccgcatgcatcagctggtaaaacgctgacggcgtttggttaagtacggtcactcgctctttcacgaggagatgtaaaaacgcttccggcgatctgctgatgtcatgcggcacgacgacgagacgtccgccgtgaagcagcggcccccatatttcccagacagagaaatcgaaagcgtaggagtgaaacatcgtccatacatcatcagaatgaaagtgataccaatgccgcgtcgactcaaacagccggataacattgctgtgcggaatgatgacacctttcggcacacctgttgatcccgacgtgtaaatgacataggccgggtgaagcggtgacagcggccgaatccggtcagcgtccgcagggttcgtgacggcatattgccgaagtgtttctttgttctgcggatcatccaggatgaaggccggcatgccgttttcgccagagagcttacttgcgccttcacggttggtgagcataaatacaggcttggcatcatgtaacataaaagcgatgcggtccgcgggataatcaggatcaagcggcaaatacgctgcccccgtcttcaggacggctaacagcccgacaatcatatctaaagaacgcggcagcgccagtgcgacaaactgctccgggccgacgccgcgggcaatcatcatgtgcgcgagctgattggctctttcattcagctctttataagtgagtccgctctcttcaaaaactgccgccgtttcatccgattttgcggcggcctgtatttcaaacagttcaggcagtgtctgccgaggctgaatatgctgttttgcccgtttaaccggcaaaagcttccggcgctcttcatcagaaagaatggttaagcttccgatcggtttttccggatgtgatgcggcatcttcgagcagaagaagcaggcgtccggcaagtgcttcagccgtttcttttctaaataagtccgtactgaactccagcagaccttcaataccggcaggcgtgccgtcgtcatggcgctgttcagccaattccagcgtcaaatcaaatttggacgatccgacactgctgatttgcaggcttgtttccatatcaggaagactgagtacagggtcaggcgtattttggaatgcgagcatcacttggaacagcggatgtcttgaccgggaacgaaccggattcaattcttccacgagacgttcaaacggcacgtcctgatgttcatatgctgcgagattcatttccctgaccctttcaagaagctcacaaaagctcggatcgccagaggtatcggttctcagtacgagtgtattaatgaacatacccacaaggtctcctaatgcgtcatcactgcggccggctatcggactgccgatcggaatatcggtccctgcaccgagccgggtcagtaacgcggaaagccctgattgaagcaccataaacaggcttacgcgctgatttctggcaagtgagagaagacgggcatgaagctcttggccgatgttgaccggaatgacgccgcccctgtagcttgattcagcgggacgcggaaaatcagacggcagctccagctgatccggtacattttcaagcgttttcttccagaaatccagctggcgcgcaattaagctctcagaatcagacgcgctgcctaaaagctgctgctgccaaagcgcataatccgcatattgaaccgccagcggcgaccattctgctttttcacctgtttgccgggcgatataggctatggataagtcacgcatgagcggattcaaggaccagccgtcacctgcgatgtgatgcaggagaaccatcagcgtatactcgccgtcaccaagatcaaacagctcagcccggacggccggctctttagcgagatcaaaccgatatcgtgccgcagcggcaagcatgtcttggagctcgtttttgtctgcacgtgtcactgtaaacacagggcgggcttcttcagcagataaaatgagctgatgagatgatcccttattttccggaaaaacggtgcgcaggctttcatgacggctgacaacatcgtaaaaggcgtgtttcagcgctgattggtcaagcttgcctgacatgcggacaatcaccggaatgttgtaagtcgggcttggcccttcaagacagtagagaaaccatagacgcagctgcgcaaatgacagcgggatatgctccggccggtcaaacggcttgagcttaggccgcgcactctttgcggtgtcaagctgtgcggcgagcccggcaacggtcggcgtatcaaacagacggccgatgccaagctctgcgcccatcgtctcccggacccggctcatcaggcgtccggctaagagcgaatgtccgcccaattcaaagaacccgtcatcaattccgacccgcgcgagaccgagaacctcggcaaacagatcgcataatatttcttcctgcggcgtccgcggccctctgtcagacaggacagcggaaaaatcaggtgcaggcagagcgctgcgatcgagcttcttattcggtgtcagcggcaattcttccagctgtacaaacgcgcccggcaccatataatccggcaggctttcgcccatatattcacgaagtccgccgatatcaaggggctgatccgcgacagcgtaagccgccagccgcttatctccgggctggtcttcacggacaatgacggcggcctgcgaaatacccggatatttcgacagcactgactcaatttctcctaattctatccggaacccgcggattttaatttggtgatcggctctgctgatataatcaagcgagccgtcctcacgccagcgcacgagatctcccgtccggtacatcctcgcgcccgcgggcccgtacggatcggcaatgaatctttccgctgttaaatcaggacggttataataacctctggcaagcccctcccccgctatataaagctcgcccgcgattcccggcgggacgggctgcaatgcggcgtccagcacatatacccgcgtgttccaaatcggcgttccgatcggaggcgcccctgtatggccttttgcaagcggctgtgcggccgaccagattgttgtttcagtcggcccgtacagattcgtcaccgtacagcctgattcaagcagagcatgcataagcgcattcggaagcgcctcacctccgacaagcacctgcagcgcccggagagaatccggttcattggtgactaatgaatgccacaatgtcggcgttgcctgcatgattgaaataccgtatgagtgaatcatgtgcgcaagcgcccgcggttcctgaatcgtctctttacgtgcgatgacgcaccccgccccgctgatgagcgggaggaagagctcaagtccggaaatatcaaacgccgcagtcgtaacggcaagcaggcggtcttgttcgccgagcgtaaacatttcccgcatggataagaggaaattgcttacgctttttaaagtgacgactacacctttcggtttgcccgttgagcccgatgtataaatgatataagcggggtgcaaaggcgaacattccgcctgagcgggacagtcagcattttgagcggcaacggtttttaccgtatccgggtcatcgagaatgatcctttttgcatcactgtcttccggcatgcggccggataattccatcgttgtaatcaggcatgcaggctgtgcatctttgagcatgtatgtgatccgctcagaaggaaaatcaggatcaagcggcaggtatgcggctcccgttttcaaaacggccagcatgctcacggctaactcctgtgaccgcggaagcagcaaagcggcaaattgttccggtccgagccccttttcctttagcatgccggcaagctggttcacgcgcttgttcaattcggcatagctgagctcttcgttttcggtgatgattgccggccggtccggtgtttttacggcctgttcgtaaaacagctccggcagacttttctgcttctcggccttgcgcgtgtcattccagctttccagtacgcggagacgttcactttcaagcagaaggttgagtgtgccgattttttgtgtctggtctttcacagcggattccaacagaagcaggaatcgtttttgatggttttcaatatcttcggcgctgtacacttccggattcgcatcaaagtccacacgcattccgcttccgtccgctctgtcgtaaacgttaattgacaaatcatcaacgggtcctgctgataaattatggacggtccctggcgctccggcgaaatcaagcgcgtagtcaaacggcatcacattgacttgcgggccgaacagcctgcgattttctccgagcaatttaaggtcgcggcgcatgtcttcatggcggtatttctgatggcgccggatgtttcggatttcttttgccacttggctgacggcctcatgaaaattcatatccgggcggagcgaaagccgcaaaggcagcagattcatgaccatactcggaatattcagtgaaattgagccgatccgccccatcatcggtaaaccgagcacgatatcccctgcgtttgtcatccgatggacatataccgccgctgcggccgtgacggcttcatgccagttcggaatcgcttttacatgctgtaaagccgtttcagaaagataagccgtgcttctccgaaaacgtgttgacgttcgcggcgctctttctgccaaactgacgacatcaggttcatccgcaaatttctccatccaaaattcccgatctttcaggaattgatcagacgcgcggtactcttgatcttcttttaccagatcctccaaagaaccgaaggagcgcccgttatccggacgtccttcccgtattgcggtgtacatttgcgccgtacgccgtgccagcagtgaaaaaccgtagccgtctatcgcaatgtggtgaatgcgctgataccagaaaaagcgttccggtcccgcctgaaataaaatgtcgcggaacaaaggcccggccgccatatcaacgggctcagccaaatctgtctgcatgagtctgagtgcggcctgcttcggatcagcttctgaactcacatctatgacatcgatcgcagcctcaaatggaggattgatgatctgcttcggcccgtctgctccctcctcgaagcgggcgtgtaatgacgcggcttccgtcagcacgcgttcgagagcggttttaaatatgttcacatcgatcgcgccgtttatctcaacgtactcgcctgtattgtaaatcggattatcaggatcaagctgctgcgcaaaccagataccggcctgtgcgcctgtcagaggcagctgttgtgtatcatgcattctattctctccctttataaataatctgcgttcggcaagactttttgagatcgggaagaaagaagtctccaccactcttccagcgtcgggttctccgccagttccacaaacgtcacttcagctccgtcacggcgccattgttcgacaaggctcatgattctgacggagtcaagacctctgtccagcaggtcttcatgatccggaatatcagacggtgattcttgaagaatcgccgcaatttgttcccgcacccggtcttttgtcaatacggcggaaaccttctcttctccttcagaaaccggcgcgccgcccagcagctccagcacttcgtttgtcaaagctgtgtaagcgcagcgctgagacgcatattcgatggccatcttatgtttttctgaagaaaaatcagcaacggcgtctccgataaagaagctttggatatcatccataaatgcttcacaggctgtgacgagacagccgatgtgtgcataaattcccgtaatcatgagctggtctctgccgctttcacgcatgatctcaaggagattcgtccgtttaaacgcgctgtatctccactttgtgaggacaatgtcctgatcatccggggcaagctccggaatgaccttttcttcataaggcccgctttttagccccggcccccaaaaatccgtcagcagcgcacggtccgccgggtcttggctgcccggctgtgcggtatacaccaccggaatgccaagtgctttgcattgctcttttatttttttgatattctgagacgcctctgtgatcggagcttcacctttcgcaaaagcatcgacgaaataattctgcatgtcatggatcagaagcaccgcgcgtttcggattcagcgtccacgatactttattttcaggcatatctgacgctgtcggcagcgcatatgcgggaatagacggtatagccaatgtaaacacttccttttttaagattgtttgatttcagccggctttactttttgggcgatcgtttcgcgaagatcctttttactgaccttgccgacgccggttttcgggaaagaagcgataaattcaatccggtcggggattttatatgccgccagtccgcgctcacgcaaaaatgctttcagctctcccggtttcggcgcttctcctttcgggatgacgaacacacaggatcgctccccgagaaaatcgtccggcattgaaaccatggccgcgtcatgaacggcaggatgcgcaagaaggtgattttccacctcctcagcggctattttttcaccgccccgattgatttgatctttcgcacgcccttcgacgatgatatagccgtccgccgtcagtttgacgatatcgccggtctgataaaatccgtcggctgtgaatgatctttcattatgttcaggcgctttataatatccgcgaatcgtgtaagggccgcgtgtaaacaaatgtcccgcttcaccgggggcgacatcccgcccgtcatcgtctaaaacccttacctcatcaaaaggagacatcggtctgccttgcgtattgacaatgatctcttcaggatcatccagtctcgtataattcaccaatccttccgccattccgaaaacctgctgaagggtgcatccgaaagcgctctttacgcggcgggccgcctcagcgctgaatttggcgcctcccacctgcagcacttgaaggcttgataaatcatcacttcgcgaaccggatgcgtccatccacaccatcgcaagcggcgggacgagcgctgtaatcgtgacacgttctttctcaattaacgggaagcagtcatccgggctcggcgtcgatgacagaacaacccggcctccggcatataaagttcccagcacacctggcgagctgagcggataattatgcgctgtcggcagagcggccatataaacgctgtgttgatccaagccgcatatttccgcgctgatgcgcaaactgtatatgtaatcgtcgtgtgttcgcggaatcagcttggacagccccgtactgcctcctgaaagctgtaaaaaggcgacttccgccgggcttacctcttccagctgaacaggctctctatgcaggctgctcagttcttgaaactcttcagcttcgccggccacaatgacatgcgccaaatccggaagtttgtctttcacctgtctggcaagcgccctgtaatcaaaacctgaatgcatatcaggaatgatgtatgctttcgcctctgcaaactcgcagaaatacgtaatctcactgcttctatgagaaggcagcgcgaaaacgggcagcgctcccagccggaacagcgcgaaaatcacttcaaaaaactcagcgatattcggcagctgaacgacaacgcggtcttccttttgaattccgagcttatgcagccccgccgctaaacgatctgccctttcatctaattctttgtaggtccaatgtacatctttacacgtcacggcagtttgatttccgtataaagccgcgcgctctttcagcattcctccgaacgtctcacccttccagcagccgtcttttcggtatttgtcagcccattcttccggccatggcgtaaatccagtcagcacgatccgttccctccttttttacaactcatcttggtaaagccccatcgcccggagcatggtgcggaatttggccgaggtctcgtccaattcatcctgcggctttgatccggcgacaatcccggcacccgcaaagagccggagagaccttgtttccgcttcggcgcagcggagtgcgataatccattctccgtcaccctcagcatcacaccagcccgccattcccgtgtagaaattgcggtcaaacggctcaatatcctgaatcgcttctctcgccgcatccgtcggcgttccgcataccgcgggtgtcggatgcagggcgatggccagctcaagtgatgtcgttgacggatcacgcagctctccctttacctcggtggacaggtgccacatcgcctcagttttaatgagtgacggtttttccggcacatcaagcacacggcagaacggtttaagggcggcggccacggcggccacgactacggcatgttcatgcagatcttttgctgattgcagcagttcttccgctcttctctgatcctcggcgggatctgtgctgcgaggtctggaacctgccagcggattggacagaatcgatgttccgtttttggacagcagcagttcaggacttgcgccgaaaagcgtttttcttgtttctgacgttcccgtcacatccgcagcgaatgtatagccgcgcgggttgtgctgcgccaaatgcttgacggcctgtggaatgtcgatatccttttcagcggtcagatgaagcgtccttgacagcacgattttgctgagcggaccgtccgtaatgctgaatacgccttgttccacaccgctcataaagccctcaggctccggaacgggacggatgtcatatgtattggattgcggcttttctgcggaagattccgcaaacgaaagcgggcctgccgtatggacattcttcggtacaaaaagccgggaagcttttctgccgtcaaaaggaatggcgccggccgcaatcggatgtttgatgccggcttgctttgcctcaagaagcgtctgtctcacgcgttcaggcagtgaatccagctgattttccgcgtctgtatcaggcacttccgcaaacattccttccgcaagcatcgtacttttcggggaagctaaaaagaacgccccgggcttgtaagcgtccagcacctcttttgcagacacttccgccaataaatgttgatttgtcatgtttgtccctccttctcgttacatcaaacgcctaaagtagcgccgccatcaacgcataaatcatgcatcgtaatatggtttgcctgttcagaagccagaaacaaaacggcatttgcaatatcagaaggcttcgccagcttttgaagcggaattcccgttttatatgtatcaagcgaacctctgatgacgtcccgggctccgttcccgtcctgccacagtgcccgctgcatgtcggtttccgttgaacccggagatacgatgttgcagcggatatgatgggccgcaagctccagtccgaggcatttcgtaaacatgacggcagccgcttttgacgccgcataagccgccatggaagcacgcggaacgccggctgcattcgaaccgaccgtaacgatggcgcctttttgacgctcaatcatgtatcggcttacagcccgtgacacatgaaatacgccggtcgtattaacagaaaatgtttgatcccaatcttcatcactgagggattgcaccggacccggccgcagcacgcccgcaacgttcgccaatatttcaataggtcccatgtcgcgttcaacggcggcgatgatatcattgacagccgcactgtcagatacatctgcggcaaacccctgcgcctgcacgccttttttccgaagtctgtcagtaagcccgagaagcaggtcttcatttgtatctatagctgccacatttacgccttgttcagcaagggcaagcgctgttgcttctccgatgccttgagcggcgccggtgacaacggccgttttccctttcattcccaatgcgtccatattatcattccctttctatattgataatgattatcattatcaactatgattcaagacaatcatatccaaatcaaaacacgcagtcaattagaaaattagaatcagccgcatttagttcgaagggcctgttttttctcatgcgggagaatacggggtatgcggtcctcccggattcaggcagaaacgcagggccctgctgattaaaacgggcaggacagaaatatggccctctccttcaaactcgctgtattcagcacggactccatcatcttcaaatccggataataaagagtacagcgcctctgcgtgctgcgggattctgcttttatgtgttttttcaatttctcccgcagccagcaatacgctgacttgaagattttccgcagagagccggtctgacaaacgttccgctttttcctgaataaaacgcttgttccagtgaattgacggactcccggcaacataggtctggaacatgtccggcctcatcaaaagcacttgcagcacaaaaagaccgcccagcgaatggccgaaaatcgtctgcctgcctctgtcgatcggataatcccgctccatcgcgggctttacttcttcttctataaaactcagaaacgcttccgcccctccctgttcgggccatgccgcgccgcgcggatgcaccggcagttctgattcagaaagcggcatcgtaaaatcactgtgccgttcggcggaaaacggctgatctgtcgggtagccgattccgacaatcaccgccggaacaacgcctgttttttcaggccgccggctttgcacccgcaatgcttcggccattgtgccgaatacggaattcgcatcgagcaggtatatgacggggaagccggatgcaggcggttcttcctgaggaaaagagacaaagatacgatacatacggcctccttttgagcgcatttctcttacttctgtgcccggaaccgcgtatcggccggccggcgcgaaaccccgctttatttgttttccgtccattatgtgttcatcccctttgcggcaattgctttatctatgcttattgataatgattttcaatatcaaaagacacctcaaataataggttttttgccaaacaaagtcaatggatttttgatataaaaaaagcaccttatttcaataaggtacctaagaactatatagtgataggggcttaatcccatgtaaagcgctcattcttccatggatctcccctcatatggtagccgtttttctcccaaaagccggggtggttttcctttgtgaactgaatgccgcgcagccattttacgcttttccaaaaataaagatgggggaaaacgcctctgagcggatagccgtgctctggcgttaacggctcgccgttatgcgcatatgccagcagggatgtttcccgcgcaaaatcagaaagcggcaggttggccgtccagccctcttcagcgtgcagaatgacgaatcccgcttctttgtgcacgcccgctttctcagcgatgtctttggcgcgtattccctgccagatattatcaagacgggaccagcccgtaacgcaatgaatatcatttttcacttcggcttcaggaaaggctttgatatcttcaaagcttaacagcataggacggtcaacaagtccgtacacttgcagattccattttgacatatcttcataataaggaacatttccggcgtgaagcacgggaaacttcgttgtgacattttgatttggcggaatccgttccgactgttttgtttgtttcgttttcccgaaaaacatatggctccctccatttagtaaacctgtgttaaatctttgttgacaatcaatcacccttcgattacgctaatctggtacaagtgtaagggggaaaaacaaatgaaacaacgcaaccttcgcgcgggcgatatggcgcttatcggcatgtttgccgcactgatggccgtcggcgccaacattacatcaatggctccttttttgcaagttgcgggaattccgttatcgctgcagcctttctgttgtctgttagccgcgatgcttctcggcgccagacgggcagccattgcaatgacggtatacgcattggccggactcgcgggggcgcctgttttcgctcaattctcagcaggctttgcgccgtttatcggaaagagcggcggatttattctcgcttatatcccggcggcatttgcagccggatggctgctggaaaaaacaaaaaaacccggccgcctgcattatgcatgggcctctttgatcggtaccgccgtcatttatatcattggcacgacctatacgtatattgcgctgaaattatggcttcatgctccgatcagctacggaatggcctggttttacatgatatggtttttcataaaagatatcgttttagcactgttattggcatcaatcgcgcctgccgtttacaggtctattcataaagcgacggggttcagcagaaacccggcgtaagatgttctcagcatacaaaaaggctcccctttccgggagcctttttttacaggacaagcgcggcaatccagccgaatatcacaagcggaatgttatagaaaagaaatgtcggtacgcacgtatcccaaatgtggtggtgctgtccgtcggcgctgaggcctgacgtcggcccgagcgtactgtcacttgcaggagaacccgcatcgccgaccgcggcggccgctccgattacggcaatcgtcgccatcggactgaatccgagctgagcgcacagcgggacaaatatggtcgtaatgacgggtacggttgcaaatgatgatccgattcccatcgtgattaataaaccgaccaccagcatcaggagcgcgcctaatgattggctgtggccgataaagcctgttgatgctttgaccaaggaagccacatcgcccgttttattcaatacatttgaaaaaccggccgcaacaagcatgacaaacccgataaaggccatcagaatcatgccgtccgtgatcagcttatccgcttcattgcgcttcatgactccgctgataaacagcgtaaacaagccggcaagcgcgcccatgatcataccttccactccgagcacttgtgacagatagagctgaacggcaagcgacacggcaatggagatcaaggcgatggcaatgctttttttcgtataaggagaagacgatagtccggcaatctccttcgtctcatatttcttcggtttccggaagacgatgacggctaaaattaaaccgaccgccatcccggccgtcgggatgattaaagcatacgggatatcactgagcggcacctttaaaccggctgacgccatattatctctcagcatcccctggaaaatctgtccgaatccgacaggcagaacgatataaggcgcagtcagtccgaatgtcatcacacacgcgatcagtctgcggtctatttcaagttcgttaaatatttttaaaagcggcggaatcaatacaggaataaacgcaatgtgaacgggcaccacgttttgcgagaaacaggatatgattaaaataatcagtacgattaacacttttgacagtgcttttttccgcgaatcttccttttttccgattagtttgacagacgcttccaccattgcatcgggaagccccgtctttgtcagcgccgcggcaaatgctccgagcagcgcgtagctgaccgcgacggtggcatttccgccgagaccgtccgtaaaagccttcaccgtctctcctaggcctaagccgccggtcagcccgccggcaagcgcgccgatcattaaagctataataatattgacacgcagcaggcttaagacgagcataagcaatactgcgacaacaacagcattcattgatgagtccctccaaaaatcctttagtttgctaatgtagtagataattaaagttaccatatattctgcgctttagtcaactaaagattttggaaatcgaaaaacccgctgcatcaaggcagcgggatgctgttatctttcgggcgtaaagcgctcagtcaaaacagccaacgtccttgccatgacgcctgttgcgccggcagggccgaagcatgtcgctttattcgccgttgcggttcccgcaatatcgagatgaacccacggcgtgttttccgcgaattcaccaatgaatgcccccgccataatcgcgtggccttctcttcccggagaattgttcaaatcagccatctgactgtttctcacccgttttttatccttttctgtaatcggaagctgccagatcggctcgccggattctttcgccgattccgccacctgttcataaaacgcggcgtgattggtcatggcgcccgtcatttcgtttcctaaggcgacaatgacaccgcccgttaacgttgcgacgtctacgaggacagaggctccgtgctgcttggcatatgtgatgccgtcggcaagcacgagacgcccttccgcatcggtgttcaggatctcaatggtttttccgctgagcgaaacgatgacgtcatccggcttcatagcatcggacgaaatcatgttgtccgtagacggtatgacagcgagcacgttttgttcaggccgcagttcgccgataatttccattgcccctaataccgaggcggcccctcccatatcgcttttcatgccgacgatgccggttttcggcttaattgaatatccgcccgtatcaaaggtaattcctttaccgaccaggccgataacgtcttcccactgatctttgccctgatacttcagaacgatcattttcggcggttcggatgagcccttgttaacagcaagcagcccgcccatgccgagctcttccatttcatctttttctaaaatttcacactcgaaatcgtattttgccgccagctcagcggcatatgacgccaaatcagtggccgtcagcatattacccggcatattcacaagcgtgcgggctgaattcgtcccttggccgtatgccgcgccgacgttcaggccggcctgcacttccctcaggtcttcttcggtcacggcgcagactgatttcagttcctgatccggctcatttgatttatgtttataatcctgcacttcgtaaaccgcaagcagacagctttctgaaagcgcatgagcggcatcggcggcaggcacttccccggagacgaatgtatcgagcaaaacggatacttcctgttttttatcttgatgaacctgctgaaatactcgtgcaaagcattctttcgtatcttcaaacgaataatccgcttctcttcccaggccgataaaataaatacgtttcataccggtcgcagccggagggtatacttttgatacacgattgcgtttggcggacacatcaccatcctttaacagctgggtcagatgaccgtccaatttatcatccaattccttcgtaaatccgttcagcgtgcttttttgaaaaagaccgatgaccagtgtttcgggatgccgcagttgatcagatgcataaaacatgagtacacactccttatgtgggtatttgttatgtaaagtggtataatgaaaaaacatttttcattgattttattttaccaaactaagggcgttttctgcagtttttcgatacgatcggaatcagcagatacagaaaggatgttgcatatggatgtacttatgaattttcctttactggcgagttttgccgccattatttttgcccaagttgtaaaagtgcctattcaatttatcgtatccaaaaaacttgaatggtctcttgtgacgagcaccggcggcatgccgagctcccattccgccgccgtcactgcgctgtcaaccggagtcgctttggaacagggactggactcgcccctgtttgcagtcgccgcaattttcgccgtcattacgatgttcgacgctacaggtgtcaggcggcatgcgggtgaacaggcgacggtcattaataaactggtcatcgactttaatcggtttgtcagcgaagcgaaggactttcagaaagcggaagagaaggaaaaacagaagaaactgaaagaactgctcggccatcagccgattgaagtgttcttcggcggcgtcaccggtattgtgctgacattgattttagattatttctttatgtaaaaaacgcttcagcggatgctgaagcgtttttattcttttaccgttttgtattgatttctgaacacttgcatcgacttggtttcgttcagctttacaagttcgtcctcggtcactgtgccgttcccttttttaatcatgtagacctcaagtgtttttttgccccaattgttatagacgtccttgacggtgtcaaagtagaggtcaaggcggctgcctttaatttttgagccggtatcggcgacaaccccgtatccgtaattcggtataaacagaatcgtcccgatcgggaaaacagacggatcggccgcaacagttgaatataaatcgcgtttgaccttcacgcctgaatatgtaattccgtactgcggatgacccggagattttccggtagattccgctccggcggtataaccggtggccgtcaccttttgtgacggatagcgttcccagtcaaaagcttcttccagcggttttatcctgcctgatgccttcttttccggctgattctgtaaggattgaaacggagtgccgatgtttttcaaaacggcgccgcgatgttccgtcatccaatttgtcagatcctttgcttcaacaccggttatggaaaagtatgtcgcatggcatgcgcccaaaaagagcacgatcatgaatacgcgtctgattatcgtcaatctgaaatcactctcctccgagtcattgttcccaactcggtgaggtgctatacaaaaagcgccgcggcacaaaaaaagctttctcgaataagaaagcggcttaaaacatttgatatcctctttttctgagcgcctttatggcaatgcctgacatgatggctcccgccagtccgcccgccaaaatcacgacatccgcaaccgctaatgacatgatgcgctgaaacaggctttgaaaggattcccccggcgcctgcacgtaactgatcatctttttattgctgataatgaaaaggcatacaatcggatagacaacagccataatccacgacattctaagcagcatgttcaacagaaagcctatgccgaaaaacagtacgaaaaatagtacgattgagatcaggacaaccggcaaactaatcacaaacatccaccccctacagcactttcagtgtacctcgggggcggtaaaaaagtcaacgtctggaaaaatcatcgtctctctttgccgcttccctggcaggagggacatgtttcggagccgccaagaagcaattgaaaataccctttacctgagcagaacggacacgccgccgtgctttttgctgtcgttttcatgcggatcaccctttttcttaattttctgataatatatcatatttacttgtcaagcaccaagtcagaatatgtaacaaaataactcatgtaagcgaaaacattcatttttttcttttacattcttttgatagcgctcttttttaaaagaagagaaaacccgcggccgcgggttttcagaagaatttaaacttcccttttttcagcgtcaggcccagcccgccgatcataaagagcgatcggttgtcaatgacctttttcataaaggacgccggcatgcctttgagcttcctgccgtatacgactccgacggcgttatgctcaccgagggaggcgacggttcctttaatgtcaggcttgaactcttcaagctggcctcctttaatcaaaccgcccagatttttggcgaccgtttctccttgctgcatcgcgatctgagcagtcggcgggtacggccgttccgtctcttcattgataaagagcgagctgtcgccgagtataaaaacgtcatcatgacccggcgcccgaagatcagggttgaccttgacacggccgcgcatattttcaaaacccgcttcctccacgatcggatgtccgcgcacgcccgccgcccagacaacggtctgcgatttgatttcttccggctcttcatctttcttgccgactgtgacaccgtctgcgcggcattcttgaaccgcggtgccgattttaaattcaacgcctttgctctcaaggtattgaacggcgtaatcgacaagctccggatcaaatcccggcaaaaccgtcggggcggcctcgacacagacgatccggacgagactttcatctatatcataatatctgcataactccggcttgcggttcgcaagttcaccgagaaattcaattcccgtaaagcccgctccgccgacaacgatggttaagcggtcagggcgtttttcggcctccgtattgtatgtcgcaaattggagctcaatatggtctttcagctggcgcgacgtattaatattcgcgatcggaaaagcgaattcttttaagcctttaatcccgaatgtttcagggacggcgccaagcccgatgacaagataatcataagggatgtccccttgtgaaagcgtcacctttttattttgcacatctatcgcttttacggtatcctgcacaaatttgacccgtgattcattgattacatcttttatttgatatctgcagcggtcatgatgcagcgttcctgcgctcgcttcatgcatccatgtcgtttcataatgataattgtgtttattgaccaaagtaatgtcagcgtcatttgccccgatatgcttcggaagccttgttactgtcattaatccaccataacctgcacctaaaaccacgattttgggtttattcaatgccatcacatccaccttcttttttttgctgttagacgcataatcaaatcaacatttgtattagcttcagcttattggcgggattttatgaaatgaaatataaaattttttagaaaaccgcacatgtctgcatatcaccatactatccggaagaatcagaaaacattcaggaaaaaacagattggaatttgtccccatattagcggcggccgcaatttttttcaagaatgaagcggccgggcggttttcggcactcgtcatccttttaaattgtatgttataattaataacaattttcaattaggaggcaatttggtatgcaagaggattcaaaggtttatgatattacggtcatcggcggcggcccggtcggcctgtttaccgctttttacgggggaatgagacaggcgagcgtcaaaatcatcgagagcctgcctcagcttggcggccagctcagcgcgctgtaccctgaaaaatatatttatgatgtagccggattcccgaaaatccgcgcccaagaacttgtgaacaacttaaaagagcaaatggcaaagttcgatcagaccatctgcttagagcaggccgttgaatctgttgaaaaacaggcggacggtgtgtttaagcttgtcacgaattcagaaacgcattattcaaaaacggttattatcaccgcgggaaacggcgcatttaagccgagaaagcttgagctggaatcagcggaacaatatgagggcaaaaacctgcattacttcattgacgacctcaatcaattcgcaggcagacgcgttgccgttctgggcggcggcgattccgcggttgactgggcgctcatgcttgagccgatcgcgaaagaagtcagcatcatccaccgccgtgataaattccgcgcgcatgagcacagtgtcgaaaacctgcataattctaaagtcaacgtgctgacaccgtttgttcccgctgaacttgtcggtgaagaccggatcgaacagctcgttctcgaagaagtgaaaggcgaccgtaaagaaatcattgaaattgatgacctgatcgtaaactacggctttgtttcttctctcggcccgattaaaaactggggccttgacatcgagaaaaattccatcgtcgtcaaaagcacgatggaaacgaatattgaaggcttctttgccgccggagatatctgcacatatgaaggcaaagtcaagctgatcgccagcggtttcggcgaagctccgacagccgtgaacaacgcgaaggcctacatggacccgaaagcgcgtgtccagccaatgcattctacaagcatgtttgaaaaataatataaaaaagagtctgtgtcataccggcacagactcttttttatttaaacatccaaatataattcatgacggttccgacaacgagcgcaatgacaagcgccgacacgacccaaatcgtgcctaaaataatccggtcctgaattttctgggctttcgggctgtgcccgggctgtttttgttccacaccggcccctcccttctttgcaaatctatctatcgtaacaaatgtcttacaacacccaatactactatgataaccaaactgcaaatggatgacaagctgaccgcatatgaggcagcatgaaatcatttgacattcctgacaaaacaaagtacattataaaaagacgaacgttttaattttatttaattctattattcgcttttaggggtgttatatatggaaaatgtatttgattacgaagatattcagctgattcctgcaaaatgcattgtggacagccgatctgaatgtgatacatcagttacattgggcggacacacgtttaaacttccggtcgtgccggccaacatgcagacgataatagatgaaaacatcgcggcctggctcgcggaaaacgggtatttttatatcatgcaccgcttcgagccggaaaaacgcctggcttttgtccaagatatgaaagcgcgcggactgatttcttccatcagtgtcggcgtgaaggaaaatgattatgaattcatccgggagctgaaagcacaggagcttgtgccggattatattaccattgatatcgcgcacggccattccaatgccgtgatcagcatgattcaatttattaaagaacatgtcccggaaagctttgtcatcgcagggaatgtcgggacgcctgaagccgtaagggagctggaacgcgcgggcgccgacgcgacaaaagtgggaatcggccccgggaaagtctgcatcaccaaaattaaaaccggcttcggaaccggcggatggcaattagccgcgcttcgctggtgcgcaaaagcggcgagcaaaccgatcattgctgacggcggcatccgcacgcacggcgatatcgcgaaatccatccgattcggcgcatctatggtcatgatcggatcattattcgccggccacgaagaatcaccgggacaaacgatcgaaatcgatggaaagctgtacaaagaatatttcggctccgcttctgaatttcaaaaaggcgaaaagaaaaacgtcgaaggcaaaaaaatgcatgtcgaacataaagggtctttacaggacacgctggttgaaatggagcaggatctgcaatcttccatctcttacgccggcggcaatacactcgaagccatccgcaatgtcgactacgtgatcgtaaaaaactctattttcaacggcgacagattttaacacgcagcagagccgctcaaagataaaaaaatgacattcaatatgaatgtcatttttttattaaataccgaaataaagagccgcactggccaacagattaatcacaaaaataaacaaaaagatgtaacgaatgaatttattttgcaccggtgcaaatataaagagatatagtcctgccaccccaaaagtaagaacaggaaacagccactcaaaggataaagaaatgatataaccgataatcataacaatcggcacaccgattaatgataatttacttctcatatgatttctgccccttttacttaaaaattggtgtgatgtaagcttcaataatggcagcggcgatcagcagacaaataattatgagcaccaatattccaatatgcctgaacattgaagccattatctttttttccttagaaaaacacagcctgatgaccaattcaacgcccttaaaaccaatggcgccacttaataataacgcgggaacttcaaatataccatgaggaattagcagtaaaaaaatctgataaaaaggaaccccgctatgcagattttctataatagagccgcttaaaataaacccgttggtgaataaataaaagattgaggtcaacccaaaggtaaaaaaacccgcggctaaaaacagacaagcgattgcattgtttttcagcagttcaaccgcgcctgacgagccgttgtaagacgctgttgaaacaaagtgatcggaaaaaaacgcagcgatcacaccgcctgaaaaaaacagcaatgatgcggttaacggaatggcggacgtcctgattgccggcaacatgcggttcatcatgtatagatactctcagccaatttttcaatctcttctaatgaatgctcggatgactgatactccgccgcaaaaacgccttcatgtataataccgatcgtatcgcacagcgaatgcgccagctccagcaagtgagtcgataacaggaccgtatgtccctgcttgacgtactcctttaataacgtccgtatcgttttaccgctgattaaatcaatgcccgtcagcggttcgtcaagaattaatatctttggctgatgaatgagcgcggccgcaattgataatttttgtttcattccatgtgaatatgttttaatcagctgatttccgtcttgagcaagcttcagcgtctctaacatattctttatatactcatttgtccgctgagacggcacttcaaacatctccgctgtaaaacgcaagtattcgactcccgttaagtaatcatataaaaaggcatggtcgggcacaaaaccgatatcagccgatatttgccccccctcttctgaatccagttccttaccgtcaatcatgacgctgcctgaagtcggtttaagcaggcccgaaatgattttcaaagtcgttgttttcccgactccattagtccccagcaaagcataaattgagccttttttcacctcaaacgaaatatctttcaacacctgtttttcactatagtttttttgtatattcactaatttaatcattgttcgcaaacctttccgccatattgattctgcgaagaaacagaaacatgactccatagtttaatagtgtgaacaggacaaaaatacctgatgcagaatgaataagcatcgtttcaagttccggctttttatagataaaatacgacgtgatcgcagcgatttgaagcgacacaatgaaaatgaaagatccgtataagttgttatacgtctttgctttccccgcttctccaatttcgtacatatgctcccagtttttcttaggatacagggcggtgcttgaaatctggacaagactgtataaaaaacccgaacataaaaacacaataaacaagtaaatcgtcagcgcagcggaagacgaaaaaaacaccgtaatcaaaatggtgatgatgaacgaatagataagagcggcgagattataaatacatactttcggaaacaccagctgccacgcatgtttgatattccggtgaaacaaatgctgattttttatttccccgtcaactgataatactgttttgagcgcatctccgacgagctgatacgaaaagttcgcaatgataaccgccgcagacacgatggcggctgccgaatacccgataaaatgatgcgatagaagcggaatacaaaaacctaaaaacagcatgaacaaatacagcatactgccgaagttcctgataaaaaacccgtcaattctcgataaaaacagcagatccttttgaaaaacggcatgaaatattttgttatttctatataatttcagctttggcgcaaaatctgcgtttgtcaaaaacatataaggaataaggtccattttcttcagcgtggccgaccacagtttaaacatccccgccgttaaaaggacggcggccgcaaacaccgcggcgaaaacgagcacggaatgtgagcggaatgctaaccatacatacggcgtattcatgaggatgttccggaaagccggtgactccgtaaagcttgaaatatcctttgcggtatactccccaaacacgagaagataaacggcatacccgactgcaagcggaaccagcaggctgacgctgaataaaatgccttttatgattttcaagtaaaacaatttgctccacatatttgtaagaagataaacaacataagaaaacagcatagataaaaataaattgagaagaaaataaacgaagcccaagaaaaatacgatgaccgccgcagacccggtcatgcctgcgcttgataaaaacaaaaagaccggaaaaacaaaaagataccatacgaaaatggtttttttgatcgcctggccggcaaaaacagaaaacagctgtaaaaaacgaaccttttttaattgatgaatgaccttgcgcgtatccagcagaaaggcattgtggtgttctttaaagaagccggcagcccaaaaaagctgctcaagtgaaacggcgattaaaacaaattgcccccatgcgctgaggggcagctgaatcagttttgtcccgaatacaacaccgcatcccaggaaaacgagatataaacataacagagaaataataatggcagacagcagtttgctgttgagttgaggaatgccccaatcttcctttctttttcgaaacgatgacagggtattatatttgataagagccgcaatttgtttgactatcatactttcaatccttacatatgtatttgggagagaggctctttttgcagcttgtacaaaaagagcaattatttattgatcgattttaccaagcagctgcgtattttttgccgtatttcttaatcattgtttttgctgttgcaacgattgcataagaaatcgcgcctgcgcctgtaacgataccgataagagaaatgatagaagcaattgttgatgccgcatcaataatatcaattgcttttttagctgcggctgtagagatgccgagagtagaagctaattcagcattggctgagaatgcatgagccgccgccacgtttaattcagttcccgttaataatagtgcataaaccaatgttgctgcagcaagagccgcgccaaacaaaatgaaagactttttattagattttactaagttcatcataacatctccctactctgtttttttaatttataataaaattcagcttaattgactctctcccgagctaaattttatccgccataaaatagtttaagaaaatagtaaagagttttagtaaaacaaaacatccagtcaaaatgattctcttgcctttactgagatcggtcagttttcccgcagcagcataaagagccgcgattgatatgagcagaaatggatccagcagctgcagactcaagttggtgccgccggcagaatatataagcgaggaatcagccgttaagtagttaacaactgaaagaatcaacattttaaatgccgagattaaagaagtcagcgtatatagaagcaaatatatttttttcggtttttttgtaccgagaataaaagcggcaacgaataacagaaatccgcctatcagaatttccacaaaagttgtgaagatcataaacccttgcagaaacatgacaatcgtacgaacacttttctccccgatatcgtaggtattttctccgacggaagaataatacgactgcagaactttatctgaaatactgaattggaagagtaatgaacagatcaaaatgatgaaaaaagaacttaaaaatatttttttattgctcaattgacctatcatattatcatccttttcttacaaaataaattaactattctatacttttacaatttagtttaatcctatcaaaaaatcaatatcctttcgaaaaatatgactttaggacgtgttgacaaagagcacgtctttcagagtttttggtgctatgtaccctttatttttttttgaatttgcaaatagtatgatttagacaattgatttgaagttttaggaagaacctgtcgaaagagacgcagggtataaaaaaggaggatatcgtcatgtatcctccggatgtatgatcgccagcacctgatgatcttcccattttccatttatttttacattttttctcgcaatgccttctttatgaaagccagctttttcgagcacccggattgacgccttattgtgcggcatgactccggcttctatccgatgcagttccagctcattgaatgcataatcgactgccagcttaacagccttcgtcgcatagcattttccgttatgttcaccatctaaaaagtaaccgatgaaagcgctttggagggaaccccgaaccacctgaaaaaggctgatcgtgtgccaattagggtctgatcctgaagaaaaatgccgaagctgtattcagtatcattttccgcattcttcattgattgttcaattcgtttttttcggccttccagcgtataaaaatcctcttgtgtcgacatggcaaaccgttcaaaaaacatgcggttttccgtctgcaaaaccagttcctgctctgcatcattcaagctgagcggcctgatatcaacgctgtttccttcctgcatatgcatcgccgtccttttgttttgatcagaaacgttttttaattgcctctcacccatatgatacggtacgctttatcgcatcaagaaaattccaagactttacgttcacctttcctttcgtgacctatgtctgatgtgagtaaccgaaacggaagcacaaggttcttttgttgacttaaaccgtgctttaagccgtatcatcatattgtgacaaggaaagaatagttttggcgggtttcccgatgatctaaaaatcaattttacagaatcactgcgtcttatttcatgcctatttgcgggatgaatatattgattggatcaaagctgaaatgttgacaaagaaatgtaaaaacaatcggaaaagaggagttaatatgaaactgacgggaaatacaatactgattacaggcggaaatgccggaataggattggctttcgcagaacggtttttaaaagcgggaaataaagttatcgtgaccggacggcgtgagcacgctcttcaaaaagcaaaggaaacattcccggatcttattacatatgtcagtgatttgagcattccatctgaacgtatatcactgtttgattgggtgaaagaaaattatccggaagtgaatgtgttagtaaacaacgcggggattcaacaacgttttcatgtgctgaaagcggatgcgaaggacaattgggactatttcaataaagaaatcacaacgaacattgaagctcccttccacctgtctatgctgttcgctccgttttttgccggaaaagaagatgcggctttcattaacgtctcttcgggattggcttttacaccgcttgccattgcaccgatctattcagcaacgaaagcggcgcttcattcatttacaatgagtctgagacatcagctttctgattcatctgtagaagtgattgaagttgcgcctccggcggtgaatacagatttaggcggagcagggctgcatactcaaggagaaccgctggatgaattcgctgatgggatttttaaaggactgaaagagggcaaacaagaaatcggatatggttcttcagaagaacggctgcgcatgtcacgggataaagccgatgaacatacggaaaatatgtacaatgcgatgaaacatacaatcgaataacctctttgaaaaaggaaaacccgcttctgttgagcgggttttccttttattaaacagataaacgccttttttaacaatggtgcaagcgccaccggaaagaaagacgtcatattttttcatcctaataatggcgggttgacccttagcactcttccggcgtaccggcgtttttggccgtgcggaaagatgaaccgcagccgcaggaagcgatggcattcgggttgtcaatggtgaaaccgccgcccatcatggactgtttgaagtcaatgatcgtgccggtcataatatcaaggctttcgctgtcgaccaaaacggtgattccgtgctgttcaaacatgctgtctttttcgcctttttcgtgctcaaatcccattccgtaagacaggccgctgcagccgccgccttttacgcccacacggagaaacgcgttttcttcttcatgctctttcatcatatcttttatatgcaaagccgctgcttcagtgatggttactggaacactcataggtagacctcctttttttaaaaacggatgctgatatctattataaaccttgaggagagtatttctcaaacgagctgtttacaaataatagacgccgctgcatacggtttcggcgggtcccgtcatcagcacgtgcccgttgtcctgccaattaatcacaaggtcgcctcccgctaaatgaacggtgatatcccggtttcgttcggaaacaccgttcaatacggatgcgacagccgccgcacaggcgcctgttccgcaagcctgtgtaatgccggagccgcgttcccatacgcggaaatgaagttcatcggcgctgacggtttccacaaattcgacattgacgccttccggaaatctcgagtctttttcaatgacgggaccgagcgttgtaagaggcgcttgattgatatccgcaaccggaaaaacaatatgggggtttcccattgatacggctgttccggaaagctccgtttctccaaaaacaaaggtttcatcgatcgtccgttcatcttcattgccgagcatcggcagctcttttttggtgaggcgcggttcgcccatatcaacggcgacttcacgcacaatcccgttgtcctctgtaatgtctgctttcactagacctgaaagcgtctcaatgaaaaaggacgtttcttctgtcagcttatgttcgtatgcgtactttgccacacagcgaaggccgttgccgcaatttttcccttcagagccgtcattattaaaaatccgcattttgacgggcgctttttctgacggacagatgaggatcattccgtcagagccgatgcccgtgtgaatgctggacactttaacggcaatctcagacagccgttcttccggcagctgttcttcaaattgatttacatatatataactgtttccaagaccgtgcatcttggtaaaacggaatgaattcatatcggcctccaactttttttcttttacttagtataaaagctcttcccctcggacacaatacaaatatcccccgtttttcatacataaaagctccctgcatatgcagggagcttttatcgtttactaaataaacatgccggcaatcgccgcgctgagaaggtttgcgagtgttcccgcaataaccgctcttaatccgaggcgcgcaatgtccgaacggcggcttggggccaaaccgcccagtgtgccgagcataatcgcaatcgaagagaagttggcaaatccgcacagcgcaaagctgataatcgtagacgtttttttagaaaagtccgcaatatgcggaccgaagtttgaataagcgacaaactcattcagcacaagtttctgtccgatatagcttcccgctccgagcgcttcatgccaaggaacgccgattacaaatgcgatcggtgaaaacacgtaaccgagaatggattctaatgtaatatgtttgaaaccgaaccagccgccgattccgccgagaattccgttcactacggcgatgagcgcgacaaacgcaagcagcatggcgccgacatttagagcaatctgaaggcccgtggacgcgccttttgccgctgcatcaatcacattagcggcgccttcgccttcttcgtccatattaaaatcgccttttatcgtctgcgttttttccgtttcaggtattaaaatttttccgaacacgaggccggcgggagccgccataaagctggccgccagcaagtattcgatcggaatgcctaacagggcgtaaccgaaaagcgtcgaacccgctacagccgaaagaccgctcgtcataatcgtaaacagctcggaacgggtcaatcccgcaatcagcggtttaatggcaagcggtgattcagactgtccgacaaaaatattcgcagccgccgcaagcgattccgttctgcttgtcccaagaagttttgacagtccgcctccaatgacgcgaaagataagctgcatgattttcaagtgatacaaaacggcaatcagcgctgagaaaaagataatgaccggcagaacgctcagcgcaaaagccgggctgctgcccacttttaacagcgggccaaaaataaagctgatgccttcgttcgcataatcaatgagaagctgcacacggcttgagaaccataaaaatacggcccgtccggcgtcccactttaatacgatgaatccgaaggccatttgtaaacataaaccgacaatgacggttcgcaggttaattttgcttttcttctctgataacaaaaaagcaatggctaatatagcaactgccccgagcagcccccaaacgatattcaatgaatccacctctaaaattttatttaaaaaaagtctttattaagataacaatatttatttttgctgtctacaaattttttattttgccaaaacccggggcgcaataaaaaagagaccccgttcggagcctctgattaaaacatcggattttcttctatgaatgtatatatgttgtcaaccagttcagcaggcgtgcctcccgtaaccacttcgccgttgaccagggcgaacagggactccatgcatttcccgcaatagcttaaacagccgtattcaagcacgtccaagttcggatccttctctaagatctcaagtgcttcctgggaaccgcgcgctaaattgctgacacagaattcaatcatcggattcatgcggtttcacctcacatatgtaccttatcctaacggaatttcctctattcgtcaaagatccggtttcacactcaatgttatcgtaacatattaattcaggttaaaggttttactattacgtgttttctggtcaatttgtaggttattttaaaactattattgtggttttagatcaaattcgatataattctagatgttattttacatagttcgttattttgtaacaacattgactaccatatttttcgggcaaaaggggaatcattatgaaaaaattggtcttgatcggcgggggttacggaaacatgcgggtgctgcaccgcttactgccgaaccagcttccgtcagatatatccatcacgctgattgacagaaacccgtatcactgcttaaaaacagaatattatgcgctcgccgccggcacgatttctgatcatcatatcagggtgtcttttcctgagcatccgaatctggatgttcaatacggtgaggtggcttccgtcgacacgaaaaacaaacaggttctgtttcatgaccgcgaaccgatttcttacgatgacgcggtgatcggactgggctgcgaggataagtatcataacgtgcccggcgcgccggaacatacttacagcattcagaccattgatcagtcacgcgaagcctatcaaaagctgaacaacctcggcgccaatgcatctgtcgctatcgtcggagcgggattaagcggcgtggagcttgccagtgaattaagagagagccgtgacgatctgaagattatgttatttgaccggggcgacctgattttatcaagctttccgaaaagactcagcaagtatgttcagaaatggtttgaagaacacggcgtcaccattatcaataatgcgaatattacaaaagtggaagacgggatcgtttataatcatgatgaaggaataccggccgatgccatcgtgtggacggcgggaattcagccgaataaagccgtcagagaactggacgctgaaaaagatccgcaaggccgcatcgttttaacaccgcatcacaaccttccgggcgatgagcatgtttacgtcgtcggtgattgcgcgagcctgccgcatgcgccgagcgcccagctggctgaagcgcaagcggaacaaattgtgcagatcctcctgaaacgctggaacaatgaagagctgccggaaacaatgccgcaatttaagctgaaaggcgttctcggttcactcggaaaaaaagcgggcttcggtcttgtcaacgaccgtccgctcatcgggcgtgtgccccgtttattaaaatcaggccttttatggatgtacaagcatcataacggctgataagaaaaaagccgctgattgcgatcagcggccatttttaagagcctgcaacatagccgcgcttttccatttcttcatatatatcttttaaatgcggattcccttcccccacaatgacatcctccaccagcacgagcggatagaaaaattcatcgtttctgatgcgctccgcaagctcttctgtctccttttgctgaggcggtgcgtcaatatcaatataccgcatgtgaaaaggctgctccggatatttccgttgcagcgccgcctccagccattcaaacgtatctttggcgctcggcatattcacgcagcttgcgcaaagcgtttcagcgccgtaaacactgagcgtaaccgactttgtcatgtatatcatcccctttacaccagtatacaaaggacggggcagcttttgtataaaaaacggtttttatgttcaagtttaaatatgctataatggggaaagcagctttgcaaaccaaacattagatttttaccgttactgtgaatataatggttttatgtatatgaaaggagcgaatctcatgactgaggttgaaatgaaagagcaagtacaggaagtattggataaattacgcccgtttctgcttcgtgacggcggtgactgtgagcttgttgatgtagacgaaggcattgtaaagcttcgcctccttggcgcatgcggcagctgcccaagttcaacgattacgctgaaagccggaatcgaacgcgcccttcttgaagaagtaccgggtgtcgttgaagtagaacaagtattttaatcataaaaccaggctgcatgacagcctggttttttattttttacaaatagccatcaaaccatgaacaaatataacggatgcgtttcatccgctgttccggatggccgcttctcgacagctcatgcgtagctttcggaaatcggatgaacgacgtcgttttgttcagtttcttcaatgcggtaaagagctgctccgcctgctctatcggacagcggtcatctcgctcaccatgcaggatcaaaagcggcgtcgaaacgcgggacgcatattttacaggagaacgatcccaaagcttatccgcttcctcaaacaaatcatgtccgagctgccagtcggtaaaaaagaaaccgatatcgctgacaccgtggaagctgaaccaatttgaaatggagcgctgtgtgacggctgctttaaaacggccggtctgcccgacaatccaattcgtcataaaccctccgtagcttccgcccgtcacaccgagacggccgctgtcaataaacggatacgcctgaacggcttcatccaccgcctgcatgacatcacggtaatctccgcctccgtaatcacccctgacacgattgacaaaatcctgcccgtagccatggcttcctctcgggttgacatacacgacagcatatccttgtgcggccagcacttggaattcgtgaaaatacgtatggccgtacatcatgtgaggcccgccgtgtatgtatagaatgagcggataggtttgatcctcttcaaaaacggcgggctttaaaaaccagccgtttaccgtcagcccgtcctttgttccatattgcagcttttccggcacggatatgatgcgctcctcaataaaccgattattgtcaaatgtcaattgcttctcttccccatcttcaagtgaaatgctgtaaagctcggaaggctgtacgggtttggcaatgacagcgatacagcttttctgatcaggatgaaaagcaaaaccattcacgtactcttcttctaatcggatcggatatacgaggccgtcaatcgagatataataaataccggtgcttccctgctcgctcccgagaacgtaaaatccctgcccgtcgtttgtccataccggccggggcgtcactcctcctatgattgaatccgcaatcagcgcatcgctcaaatgaacatccagcatgtcggtcaggcaggacagccgctcagttttcacgtcgtacagccacgctttctctaaagtcgcattgcgaaattcattttcatggccaagcatcgcgatataagaaccgtccggtgaaaacacgcaggaaccgaaagaaccgcggtgcggcgtaatctgcttcaggcttccatccgccagattcatcagatagacatcgctcggctttccggcgtcacccggctcgcataaattggcggtaaacgcaagctgcctgccatccggtgaaaaggccgcgccataatgatccgcttcatgatccgtcagctgctgaatctcccccgtttcaagatgaatcagcacaagctgggaccagcttccgttcagcaggcctttcccgtcacgtttatatgttaatgactgaatatcaaccggctcatactcgtcatgcttctttttttctttctcatcggcgcgctccgctgatgtcagactgacggacacaagcacggatctgccgtcgggcgcccatatcggatctgatacgccccaaggaatatcggccgcctgttccgcctctccgccggcagcgtcgatgatgtacagctgagggacgccgttctccctgtcagaaacaaaggcgaggcgccgtccgtcaggcgaccaccgcggacttgtatttctattgtccccgaaagtccacgggtttgagatgccggattctgtgtcatataccataatggctgaggaataggaatcacgcttatgattgactgttgtccggacgtaagcggctcttctgccgtcaggggcatattgcgggtctgtcacggatacgagagaggcaatgtcctcctcggttatgagttttttcaatcgtatctcctccttttcttttttatttcgcttccctaaataaaaatccttctccagaaaaagaaagcgtccttctctgatgggaagaacgcttttttatcattatacacttttcacctgctctaaaggattccgttcaattacgcttccttctgacgggacggtaagcgccgcaatctcacagtgggggaaatgctcagaaagctgttttctcagctcttctccctttcctttttcaatcaggacaagaatcgtcggtcccgctccgctcagcgccgtcccgtaggcgcctttcatttcggccgcatgttccacctttgaaagctcaggaacaagcatggcgcggtacggctgatggaggatgtcttttctcatcattttcccggcgagcgcccagtcatttgacatgatcgcagcaacgagaaggttgctgacggcgcttgctttaacggcgcgtcggtacggcagctctttcgggagcacgtctcttgcgtccctggtcagaacttcgtaaaacggaatcactgccacaacgtcgatatccgcttcggcaacacgcacgatatgtgtttcatcttcttcgtgaaggccgatcacaagccctcctgcaagggaagcagcggcattatcagggtgcccctcttcaagactggctaagtgcagcttgtcgctttccgacagctgcaggccgcataactcatccgcaagctcaatggcggcgacgatagcggccgcgctgcttccgagaccccgcgcaagggggatgtcactccacactttgacatgggcgggcggcagctctttctgatagcggtcagccgtccgtttggcgacttggtagatgaggttgtccgttccttgagggatgcccgcgacagtttcggtttccgccgagaactgccattcatcgtttcggaaaaccgaaagcttcaaatatctgctgagcgccatcccgacggaatcaaacccaggccctaagttggcggtgcttcccggaaccgtaatggaaaacagcatctccgcctcattcatacgcgcgccgctccatttaagtattccagaatactgtcctcatctgtcggcagcgtaatcggttttatgtcagatacgtctacagccgtgttcggatctttcaggccgtttccggtcaaaactgcgacaaccttgctgccttttggaatttcaccggattttacctgtttcaaaacgccggcgatggatgcacaggagcccggttcggcaaacacgccttcttcacgggcaatcagctgataagcgtgaagaatgtcttcatctgtgacttcatcaatttttccggctgattcttccgcagcgagcaccgctttgtcccagctggcaggattcccgattcggattgccgtcgcaacggtctctggatttttaatgacttcgccgcggacgatagccgcagaaccttccgcctcaaaaccgcgcatcttcggaagtccggtgccgtttttctcatggtattctttgaaccctttccagtaggccgtgatattcccggcgtttcctaccgggatcgccagaatgtccggcgcttcgccgagctgttcgcatacttcaaaggccgctgttttttgcccttcaatccggtaagggtttactgaattcactaatgcaatcggtgatttttcgcaaatcgaccggacgatggccagcgcgtcgtcaaagtttccgtcaatcgcgatgatttccgcaccgtacatgacggcctgcgcaagttttccgaaggcgatttttccgtccgggatgatgacgatgcatttcatgccggctctcgccgcgtatgccgcagctgccgcggatgtgttccctgtagaggcgcacatgatggtatcattgccttcttctttcgctttggcgaccgccatgaccatgccgcggtctttaaaggatcccgtcggattaacgccctctgttttcacatgcagttcaattccgagcttttcggaaagtttcggcaggtgaatcagcggcgtgttgccttcatgcaatgtcagggccggcgtctgatccgtcaccggcagaaattctttatattgatggatgagtcctttccacattagctccaaccgttcccttctacgcgatatgtgctttttacttcttgtacgacttcgaggtcatttaagttttgcagaatgtcactgaaatcttcttccgatgtatgatgcgtgacgatgacgatttccgcgaggtcgtcatggcctttgatcggcagctgcagaattttttcaaagctgacgccgcgctctgagaaggccgatgtgatttttgaaaaagagccgacctggtctttgacgtgaattcttaaaaactgctgggcatagatatcagacggctgcttcagatttctttcaaactgcggggcgacaaagctgtttccgtttacgccgagacgcatgtttttcatgaccgcgaccagatcggaaacgaccgatgtcgcagtcggcatgcttccggctccggggccgtaaaacatcgtttcgccgacggcttctccgtacacgtaaacggcattaaactcgttatgcaccgcagagagcggatgatgatccggcagcagtgtcggctgaacgctgacttcgattttattgtcatcacgctgggcgatgccgatcagcttcatcgtatagccgagccgtttgctgaagctgatgtcttcatccgttatccgggaaattccttttactttgacatcgtccagatcgacattcatagagaagccgagacgggctaaaatcgccatcttgcgtgcggcatcgaggccttctacatcggcggtcgggtccgcttccgcgaatccgagatcctgcgcttccttcagcacttcttcatacgggcttttttctttaatcattttcgttaagataaagttcgtcgttccgttgacgattcccatcatttttgtgatccggtcagaggaaaggccttcttcgagcgtgcgtaaaatcgggattccgccggcgacactcgcttcataatacaagtcacagccattttcctttgcggcggctaaaagctctgacccgtatacggcgatcagatctttatttgcggtcacaacatgttttttcgctttcaaggcatcaagaagatattgcttcgtctgttcgacaccgccgatgacttcaataatcacgtcgacttcagggtcatcgatcacatcatagacttctgtcgtcagcacttctttcggcaggtctgcgtctcgttttttatcaatatctttaactagcacttttttgatcgtcaccggacagccgacctggtgcataagcttatcctgatgatcttgtataattttgacgactccgcttcccacggttcccagtcctaacagtccaatacgaatcgcttccaaagagaaactccacctttcttccttttgtccactagaaaaggacaattgttaacccttcacagacatttaagttacaaatattatataagcccgcatttgttttgacaagcggctgaatattgtttctacggatatgaaaacgcttaacacactgatatgacaagattccctattttctaaatatttttacgtcatattttcttacgaactgattccttttccgagccacgccacaggcgggacaaaaacctgcgccgacctgacattcatcatgttgtgacatgtctgtaaaaactgttcatagcgggtgcagtcggcaagaatgtagtcaagctgctcttcgtaatactgtttttcagaatcatgagaaatgtaatagctctccaccgtctcgaagaaatggagcggaaacagcaggcggctgtaaaacaggcgtttggaaaaggaggataacggcgtaacttgctcatattcctgcagaaacaaaaacccatctttgagcaggtcgtcacgatgatacaaatatgtgctgcgcatatattccgcaatatcacgggcagcatggtcgaatacccaatcgcccggaatgcggatcaatgattcctccgaccaggtatcccgttccatccgctgatggcagattgtccccgagtcttctgcgccgggattgtcatccagctctgtatccactaaatattgaatggcgttttccgctaagcctgaataataaggaaatgcttcgatcattttcttttcgaacggttcaagcggagacatatgaattttctgcatccagaatgattccagctgatccacccgttttccccataagtccttccattggccgatcctgcccgcttctttcacttcgtacggaaaaccccgcccttttctgtgaaattcggcaagctcccctccgacagaaaacgaccggtttgagacgggaatcggcgcttttaagagcgcatacgttttgccttcgtcctcaaaggtcagttctccttccttcgtaaagataaacactgaaacgtatgggtcactttgttcttgtaaatactgactcatgtagtaaagctccgtcagctctgattgcgaaaacccggaaacgggaattataagaaagagggaattaggcgtctggaagcattggtatttctgataaacggagagctgtctgacgtggatgccgtatttttctttaatgatgcttttcatcataatcacctgcctgaaaaattagagctattcacatcgtagtcatacgccggcggaattatgaatacatattgtaatcctttgaatcaagtggagaaacatcgtacacatcggaagagtgttgtataaactagtaaaaaaagattgggtgaagcaaatgtcagaaaaggaacaactgaatcaggtggaagctgtcgccagggcgcgtttaaaagaacggggggttgagacggacgatattgccgagctggtgtatttccttcaaaaaaaatatcatcctgatttgacgatggaggtatgcaggctcaatgtggaccgtgtcatcgcaaaacgcgaggtgcaaaacgccattttaacgggaatagaattagatgtgctcgccgaacaaaaaaagctgtctgaaccgcttcagactattctggccattgatgaaagcctgtatggggttgacgaggtgctcgccttctctatcgtgaatatatacggctcaatcggctttacgaattacggctacattgacaaagaaaaacccggcattctcgggcggttaaatgataaatctacgggcgaatgccatacgtttcttgatgatatcgtcggcgcaatcgcagcagcggcttcaagccggcttgctcacagcgccagaaatacagaataaggacggccgtcatggccgtccctttttttatagatgttcaatccattcggttaaagagtcaatcgcatatgtcggcttttggtcgtaatctgccatatgctcacgctttgtcactccggtatgaaccagcagcgtatccatgcccgcattgatgccggccataatatccgttgcatagttatcgccgaccatgagtgtttcggaaatatccgttccgagcacacgcatcgcctgttccataataatggattcaggcttgccgataaagacaggctcaacgcccgttgacaccgtcaaaacggatgtgagcgaaccgttccctggtaaaagccctctttcagtcggaatggcaacgtcgccgtttgttgaaatgaaccgggcgccgtttctgatcgcaaggcatcccgttgccaacttttcatatgtaatgccgcggtcgattcccacaacgacaaagtccgcgttttcttctccgaagctcagcccgttttcttcaatggcctgacggatgccttcttcgccgatcacatacaccgacgcgtcttctttctcctgggcgatatgctgcgcagtcgccatgctcgtcgtgaagacctgctcttcagatgccggaatgtcaaagctcatcagcttgtccgccacctgcttcggcgtccgggaagaattgttcgtcacgaataaatacggaatgccgcgcgctttaagcgttctcacgaattcacacgcttcttcgattttttccgtcccgttgtacattgtgccgtccaaatctatcaaatatcctttataatccttcatactcaacactcctgtggattttctcactcgttgttatttaaatgcggaaacaggccctaattctgtttccaggtaggttcttacacgggccggaaaggctttcagcacatctctgtttgacgtgatcagcgtaaacagctcctgatgatcggcgtgctgatattcctggacaagctgctttctggaagagatcagctgcttcagcttatttccttcatcctcagctaccaccttttcatccgtcagaatatccatgatgtcgtcataactccccggatcgcgcatgataaagccgtcaatcatatcatttccgacatcgagaatgcattcgatcataagatggctgatccgctcaagcgcccttttttcgatctcgctctcccatgcaggcgtgctgtcaaacagcgccagctgggtctcaaaaaaacggagtgtttgttcgatattatttctgtcaacaaaatacacgtgacagcatccccttctgcatcaattattttctgattcgttttaaaacaaaatacgcgcagccgaaattgcagtattcgtaaatgtattcgtccaatgtgctgattttcgtttcaaaggttgctttttgattctggtcatcaaagaagcctttgagccgcagctgactgtatccccagtctcccacaatgtaatcatatttatttaatatgtctgaatagcgggctttgaacgcttcttcattaaagccgtttttaaaatcgtgtacgagttcaaactcggcattttgaataagaatcatgtcttcacctcttttatcactctttactatcataattcattgacttctgtccatcaattgcaaaatgagacggttcggacggacggagaatttttcctctttatatccagtgtagcggttcagacgatccttattcaagaatgactttttccctgcaaaaacggctccatcacaaaaaacccaaaacctgcggcgttttgggttttttcggcttatcttatgcttgggcctggcgttttttagacgcttcgttcacttgttcatccgcatggtaggaagaacggacaagcgggcctgcttcacagtggctgaagcctttttgcatcgcgatttctttcagttcggcaaattcgtccggatgataatatttttggacttttaaatgttttttcgacggctgcaggtattggccgatcgccatgatgtcgacattgttcgcaagcaggtcgtccatcacttcaataatttcttccttcgtttcgccgagaccgatcataatgcttgatttcgtcgggatgtcaggctgcatttctttcgcacggcgcaagaattccaaagaacggtcatatgttgcgcgggcccggactctcggtgtcaggcggcggacggtttcaatgttgtggttcagaatatcaggacgggtatccattaatgttttcaggttgtcgtaatttccgcccatatcggatggcagcacttcaattgtcgtgaacgggctttttctgcggatcgcccggaccgtttccgcaaagacgcctgctccgccgtctttctgatcatcacgcgctacggccgtgatgacggcgtgttttaaattcatcagcgcgacggaatcagctacgcgttccggttcctgcagatccagctcggtcggcagacccgtttttacagcgcagaagcggcatgctctcgtacagacggaaccgagaatcatgaacgtcgccgtacgtctgacagcccagcattcatggatgttcgggcattttgcttcttcacatacggtatgcagattattttcacgcattaattttttcagacccgtatagttttcattcgtgttcagctttattttgagccattccggctttctcagatgctcgtctttctttgccatttccccatcatctccattatccctttattcatgttcgtgtgcgaaaaatttctatttcacgatggatataaaacttgcggatttctattcaatagtcactttaacataggaaaaatttctcgacaagggaagagaattacttacattttctcggattgttgccgcaaactatttgtattcaatcctgaaaggagatcatgttgtgaaagttctgttatctgctcttctccttttatcagttttctgtccggctgcaagcggaaaagaacaatcggctcctgtttacggcgaacggatgcagttgtaccgcaaagccgaagcagtcacgcagattccttggtatgtgcttgcggcagttgatcaatatgaagaaaatgtccgctcaaaccgaaaggatctgccggaaaaagcgggaatcatcagcatttatattccggatcatttgtggagcggccctgaaaatccaaatcctaaggacgatgcgcctctcagcattaaagtatttgacgggatcggcctggacggcgacggcgacggaaaagccgaggtaagcaatgatgaggatatcctttatacatttgctcagtatttagcgggattcggaaccgatcttgaccatatccgcatcggtctctggaattattaccgccgtgatcagacggtcggcattatcaccgaattcatgacactgtttaaaacgttcggccgccttgatctcggagagcacgcttttccgcttcccgtgaagacggattacagctaccgcagcacatggggcgccgcacggggtttcggcgggcgccggattcacgaaggaacggatctgttcgctcattacgggctccccgtcagatcgacctgctacggtattgttgaaatgaagggctggaaccgtttcggcggctggagaatcggcatcagggatatcaataacacgtatcactacttcgctcacctgaacggctttgcaaaaggtgtgcataaaggccagatcgtcaaacccggagaggtgatcggctctgtcggcagttccgggtacggaccgccgggcaccgcgggaaaatttccgccgcatcttcactacgggatgtataaagataacggcagatcggaatggtcttttgatccgtatccccatttaagggcatgggaacgaaaagaaatccgcaggaaaaagtaaacacacagccgccaggaaagattgcggctgtgtgtttttatttatctttcttctgtttttcactcggcagctggacggaaggcgtcacacctgacccgccgcttccgttataaaactgcggcacctctccttgaatcgctttaatggagaccggaatattatttgtcacgactgatgtcttactggcaaacggaataatgaccttcacttttatttccacaaaaatactgatatcgatcagggcattgttaatgccatacggctttatttttgttttcacatcagttaacgcatcaccgatcaggttaaagcgcacggggattttcggccccagatttccgagaatgctgtttcccgtgacctgccctaagggaatatcgatcataatttcatcggccgttttcgcgcctttttccgtttcatgctgcttattgttcgactccgcttccttcagatgagcctgaagctgctttgtcactttcgccttcatgctgttgaccatttgtgtattaaaatccatcgttgtgacttttccgttttcatccgttttcatatcgaccatatctttcacattgtcgctgtgagacatgtattcttcaatggattccgtaatgacctctgtcgccacccgtttggtttccatttctcctatgttcatcagcaccggtttgattgaggagttgatcatccagaggctgatgaccgtcgatatgataaaaaaagcaaacgacagaagaagcacatatcgaaaaggcaaaggccctctcttgcgaagagcgctccggtatctaggcaagaaaaatccccccttacatatcacaatgtatgcttgtaagaggggacatagtattttatttttgttcttaaaaagtcccgcttaccttcattcgggtgaaatggaacggcgggcagctatatgacattacggctgctgcgcgagcttccaggcgagcagatcccttaaaaactccggcataaagtattgcttttcttttgaatcgcggatgtaagggaacagctttccgagtgtaaacatgtcgagaacggcaaccgagtatatccgctccggatcaatctcttctccgttcactttcacattcatgagatgcgtcacaccgtcttcaagaatgccggcctccgcctcggctccggcatataccatcctgcccatcacttccccgcggaagccgaggcctttaatccgcagctgctccatttgttccgaggcggcctggctgattgtttcctggagctccctgcctgatagacgaacggccaccggattgatcggatgagggcagatgcggtgcaggtcaagctttgtgacaggccccttctgtaaaggccccaaaataacgcctgaattcaccatgctgacttcacagccgcaccagcttttcagcgcttcggctaatagaagcgggagcggcgattcctcaaaccacttcacgccggcttcttcattcaggttggcgacttgttcggagagcaggttttccgcttcccgttccttctctttcagaaaagccgccgtatcttcagattccccttgccaatcagccattttctgtacagacgcctgtttgctgacaatggttcgtgattcactttctatcgtcagctcgacacagccgacatagttcccgtatttctccgcacatgcaagcaatacgccgtttatgtcctgtccgtcctcaagaaggtggtgcgtatgtgattcaagaatgacatcgatgtccggaaatttttccgctgcggcccggtcatcgatcaggcctaaatgagaaagcagaatgatgatgtccgctttgcccttgatatcgtcaagtgattcttgaatgcttttttccgcatccgtcaccgtccagcctagtttttgatagacgggataatacggcaccgtgacgccgagtatgccggcggtcatcccgtttttcagcgttttgatcacgtagggctcggcccattccggccgctgtccatccgcgtcaaacaggttagacacaatgacgggaaacgcggcatgggtatataaatccgccagctcatcgtgaggcagcgtaattccttcattattcccgacggcagccgcatcgatctcaagccggtttaacaagtcgacattcgctttgccgaaggtcgcttccgttatcatttggaatcggtccatatgatcgccgatgtcgaatacgagtgtttcctccccgtttttttcatgctcacttctcttctgctcaatataatgtacgattttcggccaattttcgaaatggctgtgcaaatcattcgtatgatataaacggagcttctctaacataccatctctcctaccttttagctgaatatcccttgataaatcaattcacagccgatcaaaatcaagacgacccgcatgaaaagcacgatcgttttcgtctgcacccgcttattgacccacgcgcccattttgccgccgaaccacgcgcccggaacgaggcacagcgcatacagccaattgacatggccctctgcgatatgtgacacggaacccgtcacggaggataagaaaataatgagcattgacgtcgccacagccactttcggcgggaacaaaaataacagcatcatggccggaaccataagagagccgccgccaatgccgaaaagaccgcccaataaaccgacgaaaaaggcaatcacgataccggtaaaaatacggtacgaatatgtataaagctcacccgattcatcctcatatgtccggatcatgcctttatgcgctttattgaccggttttgctttcgccttcagcattaatgtaatggaaatcaaaatcataaaaagtccgaaccagacggaaaacgtatgcgcattaaaaagtttagacaaatacgcgccgatgatgcttcccgggccggaaccgataaaaaagatcagtccgcttttgtagtcaacggttttatatttcatataggccagagttgatgacaggcccgtaaaaataatcaccaaaagggacgtgccgatggcagtctgcggtgttacgtcatggaaaaacggagtcatcgtgcttaaatagagcattgccggcacgatgataattcctcccccaagcccgatcaggctgccgaccgttcccgcgataaatcctaatatgatcaaaataagataagacatgtgtcttgaaacctcttttctagctgaataggtcgagctgcttcggagcaagcccggtatatgagatatttaacatttcaagcatctcaagcccgttatcggcagcgtctccgcctgagttattattgaagagcacatacagattgcgcgactgttttttcagcacctgaagattgtttttccaatctttgagctcctgtttgttatagcggtataaatatctgacctcacgccagttttgtccgccgtctggtttgatccagccctgtttgttccgcccgtgaaaacggacaagcgttttttcttcatccgttgctttcaggacggtcggaatgctgccctcgccgatttgcggctcgtcacatatgctgtgaatccagccttcctccttcataaaggaaagcgtctgttcataaaatggcggggaaaaccaagaccggttgcggaattcaagcgcgcacgggatatcgcccatctgctgcctgcaccatcttaaatatgcgacgttttctttcttgcagtcaaaccacggcgggaattggaacagcaccatggcaagctttccatgctctatatacggcgataatgacagcttaaacgcctcaaacatttcttccttcgattcatagggaatatcgccgcgctgatggcccgtcattccttgatatgccttaatgacaaattgaaaagattccggcgtctctttgacccatctttcattattgcgggcgggctgtatcgcgtaaaagctcgcgtccagctcaacgatgggaaaatgggaggaatacgcctgcagtttttgcgggcccgctgttttaggcggatagatgctgtcatgatccccccaccccgtcagtccgatataaatcacaatccttcacctctcactctagtttatcacaggtgtttttctctttctgtttccatgttttttctgaatgcacttttcaggaaccgatactgatgttcattggtgtccgaaaatgcctcatctctggaagaaagaatgtgctgatagacgatcggctctgaaaactgaccgctcgtgaaatcatatatctccccgtctattcggttataaaaatgccagcttgtgccggtttttgttttgagaatgtcaccgccgtaaacatcttggatgactaaagccgtcacgccgcactggcctttggccgggcaatcttccgtccattttgtactagtcttgcgcgaccaggatgccgttaatatgttcaagatttgatcatacaatgtgttttactcctttttataaaaagataccacgagacccgctttccaaacgacaaaaaaagccgattctcatcagagaatcggctcttttatttgagaaggcttcaggaatgttccaaaagccccgctctgcttacggcctccatcctgatacacacagcgtcccttgctgtaggtcgcagcaattcggtatggaaaggtgcggccttcatacaggctttgcttatgtttggaaaacatcgtttcttttgtgacggtaaaaggttccggccggacgatggcaaaatcagcgtcaaatccctcttcaagccgtcctttattcgttaaaccgaagcgcttggcaggtgcttcggccgtccatcgggccacatgttcaaacggaatcccatgatcgatcgctaattgaatcatgccgagaagcgtaaattggcctccgctgatcccgccccacgacagaaacatattatcctcgcgtttcaaagacggatgacagggagaatgatccgaagacaccatatcaatcaggccctcagccaaaactccgatcaattcctctttatccgcctctgagcggagcggcggagcgcatttggcggccgccccttttttgaggaagtcttcaaagctgaataataagtagtgcggacacgtttcaacggtgacatccaatccgtcttttttcgcctgctgaatggagagcacggcccgtttcgtgctgatatgtacaaaatgaagcgcgcatcccgtcgctcttgcatattcaatcgcccgctgcacagcctcgcattcggcttcttccggacgtgaggaagcgtaagcgcgggcatcaattttcccttggagcgcgtactcggcttcaaggaatcgggtgagggcgtcgctttctgcgtgcagggccaaaatcttgccgcacgctgcgatttccttcattccctttaaaagagtccgttcatcggctgattgaaattcatccgttcccgatttagacagaaacgctttaaacccgattgcccccgcttctgccatcggccggatatgttcggtatatccgggcatcaaaccgccccaaagcgcaaaatcaaccgctgacttccgttcggcgatttccgcctttgccagcaggttttcagcagttaccgtcgaagggatgcagttaagcggcatatcaaaataagccgtacagccgccggcagccagcatgtttgagccggtttcaatgccttcccattcttctcggccgggttcattgaaatggacgtgacaatcgaccgcgcccggaaacacatacatgccgtccgcctgcaccacttgttccgcgttttcgtcaatgccgggtccgatcaaggcgattttcccgtccttgacggcgatatcagcccgctctgttccgccttttcgtacagctttcgcaccctttacaattacgtcataggccattttatcttcctccctgtaaggatgacgattttctgtcagtttttatcacaacatgcgtctatgattgccagtttactgctactatgatcgtaatacatcagcaaaaccgctataatttttgatgatttttattcatattaaccaatggttgtctttagaacctgaaaggagactgactgatgaatatttatgacgtgatgaagattcccgcttatgagcgggcaacattaatcgcaggcaaatccggcggatggaggggggtgcagcacgtcaacatgatggatgcgccggacatcgctgattttttacataaaaacgaattgctcgtcaccacggcttatcacttgaaggaccgcccgcagctgttgaaagatttgatccgcctcatggcaaaacggggctgcgcgggactggggatcaaaacgaagcgttatcttaatgtcattccgaaagatgccgcggagcttgccgaccggtatgaatttccgattattgagctgccggaagacatcaggctcggagatatcgtcaacgccacactgagccatattcttgatatgcgttcaaatgagctacagcaggccatttacgcccataaaaaattcacaaaccacatcatgagcggcaaggggctgcaatccctgcttaagaagctctcagacattctccggcttcccgtgctgcttttggatcagcatacaaaactcttatcatcgtcccaccgcatacccattgacacgtctttattgaaacacatctgttattccctttccgggccttatttcacctgcttttccatgctgtccgacagaaaggcgtattctgtcctgccgattctgaatgttgaaaaaaactgcggttatctggtgattccggagctcgtgcagaccgctgataaaggcatgattttgacaattgaacaggcggccaacgtcatttcctttgaactgctgaaagaaaatgccgtcaaacaattcggcagacgggcgcgcaatgaatttttcagcaatttcatcgaccgctcgtttaccggccatgaagaaatcaaaagccgcgccaaagaattccggctccgctgggatcagaaatacatgtgcatttgcggaaaactcgaccgaaatgagaaaacgatcagctttaccgaaaatcagctcgtttccgatcatgtatttgatctgcttgaaggggagctgtcatcctttccgtttccccctcatctctttattaaaggaaatgtcggtattcttttaattgaagcgacagacagctggaatgaaatgcacgcgtctgtcatcagctttttggagcagtttcaaaagcaggtccggacgcaatttaaacggactgtctccttcggcatctcaaacatatgccaaaagctgatcgacgtccctgacgcttttactgaagcttcagacgccatttcatccgggcatttgtccagaagcgccgagtttattcaaatctatcatgccaaagacgtgccggagctgctccgcctgcttccggcggaagatgtgaagaagttttacgaagccaccctccaaagcctggccgaccggcaaaaggaggaccagagcctgcttcatacgctgtctgtttacctggagacccactgccagatttcagaaacggctaagcgcctgtacgtccatcgaaatacggtgatctatcgtttagaaaaatgcgaggaactgctcggcaaaagcttaaaagatccggagacgacgatgcgcctgcggctcgcgctgagaatgcagcggctgatcggttaaggaatcgttagagacagggatgcgggtgttctcccgcatcctatttaagagggattcattcagctaaattctcaaaatgctgccatcaaaatctgcttccagtgatgtcatcaggctttttctaatatccgggatgcaaccgataatctcaccctttttaatttcatcccaaattgcctcggaacctttgtcacaagcacccatgatccttttttgatggtttcgccattcatttaaaaatcagcggggagcgacataagactcaaccacttcaccaacgccgccctgaaagtcatgttgcttttccttttctgatttcataaaaaaactgcttttgattagcagccttgtctacgtaagaaacatgtgtgatttttgcatttatcagttctcttggcatgtgttcactcatttcaaagaatatttaacaatttctccattgttacatttccgttaagtgttatttttatcctataaaagacaaaaggaggtttcactttgaaactagctaaaaatgctttgttatcacttgcaattgtttcattcgttttcgcgcctttttttaactcttcagcatcagctgccgggcccactactaaagtgaataagaacatatgggacccaacagaaacccgtatcaccttaaaagttggagatgtaagaacttttgctaatgcaggtaaccacatttcctttaatccgctcacaaaacccaatgctattaaatatacaacgttaggtagcatcagcactgtccaagtctttgcagtagctaaaggacaagcatacatcgaattctatgatgactccttcacttggagaacccgatactattttttgttgagtaataacctgaagagatagattctatctcttctttttaattaaatgattgcggcgtttcgaattttttatttttcctcagctgacagcccctaaatttcgttatttaccacaggcgatagaacgcagtgacaactaacccgctcacggcggaaagctttgtgtctcgctgatacatacaagtttcgctgcttcctggtatcttgaattctttgtcaacaccaacagtcgaacacatcaagaccaaataccgcttctgacgggccgtgcaaggggattttataaaatttccaaaaaaggaggggcgcttcccctccgtgaatcgtaatgaagcttcttatgttggctaatggctgtctggataatggtctcactgtcatcttggaaagatcacttacttctataagtctttctttttaacaaaaaccgcagatatagcagcagaaataactatccgctccgcttcttatgcactctctgtaacatggagaattataaaaaggagggcgcgcggaaacataggtggagctccctgaatgggtcaattgatgggcccatggataagaattaaattcttgccgctgatacaaatggaatgacgggtaataatacaatattttcaactccttttcagtacaccttattgtacttaccgacaccctttttagatgattgtctcttgcataattgtgtgttggcctaattgcgggttttaatctgcaaaattcgtgcaggggaaccatcacaaagtcatccgagaaaggttttataagaccaccactccttaatgtcaccaatagaccccttctgaacagttcgtattatttcaatgacccgttttatcagaatgctctcccccctgcatacgaaacagcaagttccaaaacactgctttttccttttctccatttacgccgctcaatgttgtccccgcctgactgccttcttttttgatcaacttctggcagatcaaattcgtcagactcgtcaagcgataaaactggttttcctttatctacaccttttccggtttccattcgcgccatgcttgagcatacggaacaactcattttcctataattcacaatggcgttcgatatgattttccctctatgcgcatctctgcaatttcagagatacagacagccaaagaataaacgacaatcagcaaaaagcctccggatacccggaggcttttgattctatccttgctgcgtgaacggccgggtctgtgtctttttgccccagccaagcgcggccagaaaactgatggtgagaatggccgctcccagcatatacggaaattccatatttacatcaaagagaaaaccggcggctgacggtccggcgatattcgctaagctgatgaatgaggtgttcatccctccggcaaacccctgctggtcaccggcgagcttcgacagcatcgtattaaccgccggccggagcagcgatgtcagcgtcaggaaaaagattgccgcggcaaaaacggcccaatatgaacccgcaaaccggcaccacacaagtcctgcagcagccccgatcaacgtcacgttaatgacgcgtttttccccgaacttgcggacgagataactgacgccgaccgcctgaacaaacaccccgatgagacccgcggccgtaataataaaagcaatatcagaggctttaaatccgtgtttatggtcaacgtaaagaccgaaaacggattcaaagttcataattccgaagttcagcacaaaaaccagaatcagcataaacgcgaacggcgatttgagcgcgcgtgacatttgcttaaacagatgctcacgtttttccgtttttgcccgggcttccagctgcttttcacgtcccagcgtttcgggcagaaagaaaaatgaaagcacacttgaaaagcaggcaagacttgcagacacgatgaacggcacagacatgccgtaatgaaccaaatagcctccgacaccgggcccgatgacgacaccaagcgtcatcgccgcgctgaacagccccattcctttcccgcgttcttcttcggtcgtaatatccgcaatgtaagcgaacattgacggcattaaaaacgccgcgcccattccgcccaaaaggcgggatgcgaacaattgccagaggcttccggcaaaggcgaagatcaattgtgacacggcaaaggcggcgatgccgaaaataatcagtttccgccgtccgtatttgtcggttatttccccggcaataggcgcaaataaaagctgtgtaagccccgccgccgcaacaagcagacccatcgtgctgcccgtcgctccgaattcggtaatataggtgggcataatcggaataatcaatccgattccaagcatcgcaataaacatattcagcattaaaattgacaatcggcctatgtacgccatgatttcttaccttctccccagacaaacagatgatcattccatatttgtcattttttataccactcagtataacgggcaaaagggaaaaaagtccagatgatttcaatctcgttttcaagtctcatgacagcacaccggtttcagccggcagatcatatatgttaagggccgcctgcagcgcttccccggctttaacggcaactccgtgtctgatcagaaccgcttcaagtccggccagcacaaacagcacattttcctttctgcagctgtagcccatcgttccgattctccaaattttcccctgcagcggaccgaatgagctggcgatttcaattccgaattgagacaaaagcatacttctgatcgattcgccgtctgcttccggcggaatcttcacgcatgtgacgacaggcagcttcgcctccggatcgccgaataaatcaaggcccatcgctgcaagtcccgccgtaagcgctttttcatgacgccgatgcctgcggaaccgttcttcaagtccttcttccaggacaaggcgcacaccctcccgcagcgcataaagcattgctgtcgcttctgtatggtgattcagccttctttcactccaataatcttcgagctggctcagatcaaaatagttgctcgtaaccggccgatgaccggacagccttttgccgtcagctgccgtcgcaatgcctcgttctacctttttacgcacggcaatgacagctgccgtccggtcattataagtaatcggagccattcccgaggggaccgacaggcatttttgcgttcccccgatgactgcgtcaatcttccattcatccgtttttacggcgcagcctccgatcgtggccacggcatccacgataaagagtgcgtcttgagcgcggcacgcttccccgatttctttcagcgggtgaatccgccccgttgatgtttctccgtgcaccatagcgacgattttcggggaaatctttttcatctcgctgataatctcttcaggccggaagaccgttccccattcacactcgatcgtatgaacgtccgctccgtaccgctcggcgatttcagtcagcaggtatccgaagcgtccgtatatcggaacgagcacgctgtcgcccggttctatcacacttgcgagaacagcctcaatccccgctcttgatgtaccgtcaatcggataggcccagcggttttccgtttgaaacaattcacggagcatttgcatcgtttcgttcatgatgccggtaaatgccgggtcaaactggccgatgatcggagcgcccatcgccctcagcactctcggttcagcttctgtcggtcccggtgtcataatcgttctttgcggaatgcacaattcttttctggtcggcacgccgattccccctttacgttaataggcaagtttatgtaatacattcgccagcgtaaggacgccggtttcaagctgatgtgcgggtgtgaattcaagcggcgagtggctgatcccgccacggctcggcacaaacagcatgcaggccggaaaggttctgccgagcatctgggcgtcatgtcccgctccgcttacgattttctccgggtccgccccctgttcttttgcagcctccgctgcggtacgcgtcagtgtctgattcatttgaaccggctctatcctcatatattcatcaataacgggtctgactcctttgctgcggctgatgttttcaacaatcgacaccagtttctgatggaaggctgccagcacgtcttcctccgggtggcgaatatcaacggaaaactggatacggcccggaatgacattcgccatattcggttcaaccgtcattttcccgcacgtcaggcggagctcttccggctgtctttccgctgagagcatgagttcgtggatgatgctgcttcccgccgcgagcgggtctttccgccatttcattgaagtggtgccggcatggttgcattcaccgtcaagcgtaacggtatagcgtctctgtccggcaatcccggtgacaatcccgatatcccttcccgatcgttcaagcgtttgcccctgttcaatatgaatttccagaaaggcactaatatcagtgcgcagcggtgctggataacggcctgcaccgaagccgttctgccgcatggcttctttcagagaaatgccggacgcgtctttcggcgtttccgcatctgatagcgagaaagcaccggtgatattgcctgagccccaataggtgatgggaaaacggctcccttcctcttcacagagcgacacagcctccagcgtttttttcggacgcccgcacgtctcatgcaaataccggatcgccagcatgcccgccagcacgccgaacgcaccgtcatatttgccgccgtcaataacggtgtcaatatgcgacccggtcagaatcacctcatcaggcgattctgtgccgttcagccggccgaacacgtttccgacatcgtcaaatgccgtttccagcccgaacgcctccattttctttttgacggcaagctgggcgtccatccattctttcgtatataaaagcctcgtcactccgccggaagcggaagcgccgaattgagacagccattgtatgtcatcggaaatcccgatattcgccgccgaaagctgctgatgttccatacacgccctccttttaaactgaaaaactgacaagatgatcttcattatagaaggagcgcataacgagttcattatcatatcctctaaaaaatcaatgattttccggatactttgaccaataagccgaaggaaccatttttcaaaaaagatagaatattagatttattttttggataatagaggtaaaggagggcaagtcatgacaaaaaaactttggtttctgccgattgtctgcctgtttttcatttttggatgggccgcgccgtcagcctctgcgggcgcgccggctgacacgaatctgtacagccggatggcggtttcaactgccggcggcacaactctttttccgcaaactgcctcagctgtcatcactccgtctgcggatacggacacatattacaaagaagcttccggaaaaagcggaacagccttaaaaagcgccctgcaccgcatcatcagcggacatacaaagctgtcttacagccaagtgtggaatgcattgaaggaaactgacgaagatccggcaaacccgaacaatgtcatcttgctctacacccgggaatcacgggccaaaagtaaaaacggcggaagcgtcggggactggaaccgcgaacatgtgtgggcaaagtcacacggtaacttcggaacagctgcaggccccgggacggacattcatcatctgcgccctgcagacgtccaggtgaatagtgccagaggaaacatggattttgataacggcggctcagaatacccgaaagcgccgggtaattattacgacggtgattcctgggagccgcgcgatgaggttaaaggagacgtcgcccgcatgctgttttacatggcggtgcgttatgaaggagaagacggatatcccgaccttgagctgaatgataaaaccggaaacggctcagctccttacatgggaaaactgtccgttttgctcaaatggaatcaacaagaccccgtcgacagtaaggaaaaacggcggaacgaaatcatttacgaagactatcagcataaccgcaatccgtttatcgaccatccggaatgggcggatgaaatctggtaatcgtatcataagaagtgataagggagccccgatcatcaagctccctttttcaatatacggcgttttcagtgtcggcatcaaaaaagacggcccggttcatattgaccgcaagcagaatggcatcgccgggtttcacctgtgaagcgccgtcaagacggatcgtcatgcggtcatctccgctcaccgcatgaacgtacatctccgcgcctaagttttcacatacttccgccacagcgcggcacaccgcttcaggcgggtgctctgattgtccggcaagcgtcaaatgctccggacgcagccccgcaatcatctccttaccgctgtatcctttctgcacaagaacagccgctttttctttcggaatgggcagacgaacggacgaaccggcaaaataccattgcccgtgactttcttcaatgacgccttttataaaattcatactcggagaaccgataaaacccgccacaaacatattctccggataatgataaatctcatgggggcttgcggcctgctgaatatctccttcattcatcacgacaatccggtcgcccattgtcatcgcttccgtctgatcatgcgtcacataaacgatggtcgctttcaaacgctgatggagcttgctgatttcggcgcgcatcgtcactcgcaatttcgcatctaagttggaaagcggctcgtccatcagaaacactttcggctcccgcacgatcgaccggccgagcgcaacccgctgccgttgcccgcctgagagagccttcggtttccgcttgagcagatgcccgatttccaaaatatcggcggttgtccggactcgctctgcgatttcttttttcggcagctttctgagcttcaagccgaacgccatattatcaaacaccgtcatgtggggatacagcgcgtaattctgaaaaaccatcgcgatatcgcgatccttcgggggcagatcgttcaccgcgtctccatcgatataaagcttcccttcagaaatgctctccagtccggcaatcattctgagtgtcgtagatttgccgcagccggagggaccgacaagcaccagcagttcctcatcttttacatctaagtgaaaatccttcactgccgccgattgggcgccgtatgtttttttgatatggtcaaatattaatgatgccattcgaaacctcctccaatactggaaaccgccacatctttctgttatgttaaaaatgttcggggtttctgacagattcataaatgaaaagcaaatttgtattataacgtcataatacatataatagtactactacttgacaaaggaggtccgtcccattgttaaataacgggagctcgaaacctttatatattcagctgaaacaaattatcgcggacgatatcaagaagggcgtttattcgccgtccgtgaaactgccgaccgaaaatgagctgtgcgaaacgtacaacgtcagccgcataacggtcaggaaggccatccttgatcttgtggaagaaggctggctcgtccggcagcagggaaagggaacgttcgttaaaagccctaaactgaagcgggagctcatcgcggtcaacggctactctgaatttatggaatcaacggggaaaaaaccgaaacaccagatcctttcccatgaaatcattgaagcgcctaaatccatcgcccaaaaacttcgcgtcgcttccgaaagtcccgttcttgaattaaaacgcattttatttcacgacgaccagccgctctcattcgaaatcgcccactatccgctcagtttatttcccgacatcggcaagcatattaaaggaggtgtgtcgatgcatgacattttgaaacagcactatcaagtggtgcccacccataatacgaagctgttaaatgtcgtatacgccaagcaggaagaaagccgctatctggcttgtgatatcggggatgcactttttgaaattgacaaaaccgcatttatgtcaaaagacaagccgatatacagctcgctgtttttaatgcataccgaccgcgttacgtttaccattaacagtccctatgcgtaacaagtataaaaaacgagacaatgcttatcgtattctcgttttttcactgcttttcccgccgcccggcctgtagggatgcccgtaaccgaacgctccgaaccctccgcatgttttggcagccgtcccggcggccgcagtaagcgctcgccgaatatcctgatgctcgaagaaatcggtaagaaacccggcgataaaagaatcacccgcgcccaatgtatctattatatcagctcttaccaccggctgatgatagacgcgttccccatccgataacaccgcgccatgttctccccttgtcagacagacgattttcgctccgaaaccgcgggctttttcggcaagccgcatacattcactttcactcaaatcactcccggaaaaaaacgcatacgtcacgtacggacagaccgcttctaaataggcttcgtcacgttttacagagaagtcaaaggaaatcggcacatggccgctcagcatcggaaggtcacgttctatcctgctgtatacgctcgtatgcagcagatcatgtccggcgataaatgagatgtcattctcctgaaaagcgagcgtcagacgcgattgcacgccgcctttatttgacccggcaaatatcctgtcccctctttcatcaagcgtgacgaccgccatcccgttttctccgtatgcccggcggatcagatcggcattcaccttttccagtttcagcacattcaatacgtgatccgccgcttcatcactgccgagaatcccgatataagaagtttcgtggcctaagcgccgggcaagcacggctacgtttaacgcatttccgcccggataaaacgtctcctgatcctgataataatctactacattatctccggccgctatcagtttcatcttttcatcctccttatccttttacgcttcccgcagcaatgccgcggataaaatatctctgcatcaatagaaacagcgcgatgatcggagcagcagaaatcgtcagcccggccagcagcacgccccaatccgtctgcagcgcatctctgaactgcatcagcccggccggaatcgtccgtaaattttcatcatcgataaaaataatcgcaaacataaactcattccatgtatggtaagccgtcaaaatgcctgatgtcaccagaatcggcacgctcataggtaagaatattctgaaaaatattccgaaacttgtacatccatccagataggcagcttcctcaagctctttggaaatcgacaaaaaataggaacggatcaaaatcacggtaaacggaatacggtaggcggcgtacggaagaatcaatgcccaatacgtattgtacagtcccaatgactggataatggagtacagcggcacaagactgacctgcggcgtcagcatcaagccgccaagacaaatgatcagcacaaacccttttcctttaaattgaaaacgggcaagcccgtatgccgcccaggcgctcacaaatacggtgatgagacaagtcagcacggtcacaatgacgctgttcataaaataagcggaaatcccttgattccatgcggatacgaagttttcgggatgccagacagagggcagcgaccagctgtgctcaaaaatctcatccgagcttttaaaggcgctgaccgccatccataacagcggataagcaacggcaatgaggtagataatgagaaacagccacacagacgtttccccgacataccattttctcggttttccgcctgttctgacggcctgatgggcatgacgcaagtccgtcttttcaggaagcatcggctactcctcctttccggtcttaaagaatttcatctgaataagcgacagagcaagcgtcagcaaaagcaccaccgtcgcgatcgcagaagcgtagcccatcatatcctttgtaaaagcgctcttatacaaaaatgtgctcagcacttctgaagcattgcccggccctccgccggtcagaatatacggttcattaaatacggtaaatgcgccggtcagcgtcatcaccacagcaacaaacgacatttctttcgtctgcggcaccgtaatgtgaaaaaactgctggatttttccggctccgtccagctgcgccgattcatataattcagcaggaatgctctgaatcgagacaatgtacagcatggcgatgtaaccgacagactgccattgagacacaaaaatgacagacagcatagcggtgttttcatcgcccagccacgcccgggtcagttcatcaagtccgacggcttccagcagctgattcaaaagcccgatttccgggttataaataaaatcaaacaacagcgcaatgacggtcatggaaatgacgaccggaagaaaaaagaccgtgcggaaaaacggcgaccattttcttaccaatctgtcttccagcacggccgccagaattaagccgccgccaacctggcaaatcagcgatatgaccgcatacagcacattgttgcggagcgctgtaaaaaatacgggatcgtgaaacaggtcaatataatttttcaaaccgataaacgtcttttcgggttgaaatgagctccattcaaacagactgaaaaacacattctcaataatcggaatgtaaacgaacagcagaaaaatcagcgcgggcgcgagaaaaagatacggaatgaaacgttttcggctgaccaaggaaatcctcatctcctttctccaaagaaatctgttctattcagatgacgctttgacctgacgcgccgctttctgcacggaattcatcacctcgcgcggtgtcattgtgccgccgagcatctgctgaacgcctgccgcatacacatcggcgatttcaacgtcaacatccatatcaaaccacggcaccattgattcggcgcggacgatatcctgcacggcttcacgctggatcggggcggaattgttttctgtcgccgttccttgaaccgcgctgtatttaccgacgtcttttatcagcttctctcccatttttttcgaggttaaaaactgtagaaattccatggcttctttcgggtgcttcgtttttgaggaaatcataaatccttccggagatccggtcagtgcacggggagatcccttttcgccgctgattttcgggaaaggaaacaagcccagattgaccggttcgacgagcttaatttctgccgtttccgcataaatcatcgccgctttgccgctcgtaaactgctggcgcacgtattcgtgatcaacggagttcacgtgctttgtaaagtacggcagaagttcctgaagcttttcaagcgctttgacatagccttcgtccgtaaactccccggtttccgggctgtaatccttcgcccgcgttttttcatccaccatacgctggttcagcgtcccgatataatgagaaatcgtccaaggcgcttttgtgccgaaactgatcggaatatatccgttctctttcaatttctcagagactgtgatcagttcatcccatgtcgccggggacttcaaatgtaatgtatgaaaaatgtccttattataaaagaatgatttagcgtccatttgccacggaacaccgtactgttttccgtcatgcgtaaagggtttgatttgtgactgcacaagctgtgaggaccaatctttatcctgctgatagtaagacgacagatcgagggctttatctcctttgatgaatttataagcaaaccggtcgctccatgaaaagaaaatatcaggggggctcgttgttccgagcatgactttcaccttgtctttataagaatcgtttaagaccgcttccgtttggatatgaatatccggatgagcagcttcaaattctttgaccgcttcttcgaaatagcttttttccggctccttcggccacctgtgaaaaaacttcaaggtcacttttccgtcagaggaactgctttggcttgaacaggcggcggctgacagacatacggctaacagaacgaacaggcagatgagctttttcagatgcttttcctcctttgtcaccggactataacgttatatatcattatagtccggtgaaatataatgcgcgttcttaatattcgactttccacatgtaacgccgctggcttaacggatggttccttgcttccgccagcgcatccgcatagcttctgagcacccggtttaatacgagaggagccagatagccttttacagaatcgtcaattccggaaaaatcatatgctgccgcatcaagcacagtcagttttttgccgtatctttttgagaaggaaagcgcccgctcttcaaggggtcttgtttcgtctaagccgagcaggataataaatggaacggattcatcaatgatttcgaacggtccgtgaaaatattctccggcatgaatggcgtgggaatgaatccattgcatttccatgagaatgcagatgctgtaggagtaagcgacgccgtagttcgcaccgcttgccatcgtgtaaatgatatcttctttttcgtgggctttcgcgaatgcctttgcgtgatccgcttcttgtttaagcgctttgtcatatacggtctggagcttattgagtccgtcgatcgccggctcaaacgcgggatggttttccagcacgtgtaaagcgccgaacacgatttgatacagaaccccgtaattcgtatttatcgcctgtgcattctcaccccagtcatacaccgcgacatattcggcttctttcgctagcggcgaatcaggctcaaaggtcatcgcaatcgtaagcgcgcctttttttctggcgaaaccggcggctttcaccgtttccggcgtattgcctgactgagaacataaaatcacgagagagttctccccgagctgaacgggattgcgctgaataaattcatttgaactgtagagatcagagctgatggctttcgcctctctgtcaaacacgtacttgctcggatacataatggctgaagaacccccgcaagcgacgaaaaagacgtggtcaatcgtttttcctttcagatcatccaagaaagcctgaactttgtgattcacttgtgcggcagtttgactcaaatccttcactcctcagtgttttattatataacgttatataacattatataacgttatattaatcgcaacaaaggtgcgttgtcaatcatattttctgaaatttctaaaatataaaataaacccgtcttatttcccgccctctcttgacctgacccttagagacacgtttagaatgaaaaacagggagtgattcagaatgaatataaaagaagccgccagacagacgggtctcacgaaaaaagccatcaaatattatgagcaggaaggtttaatcaccgtcagcaaaaaccctgataacggataccgtgagtattccgctcagaacgtgaatacgctgaaaatgattgccgccctccgaatgctggcactgtctgtaagcgatattaaagcgttcctcttagagggcagcagtctgcatgatatactgcgccggcagcatcaaaagctcagccggcagattgaagagcttgagcaggaacggaaactgactgaaatgctgatcaagcgcgtggaagatgcggaaaatgtcgattcaattctgcatgatatcggcgaggtcaaaatagatgaaccgaagtatatgggacttcagctgaaaaaactgttcccgggagatttcggagaatttatcgccgcgctgtttgaaccgttcctcgacttttctattgatacagatgagaaaaaaacgatatgggcggagcttattaaagtattggatgatatggaagaagttccggctgcacacccgatgatgcagctggtcggcaaggaggatccggctcagctccagcagcacaaagtacagcatgaccaatttatcgagcggattttggagagagaccccgccacttgggacactcataaaaacatcatcattcagcttgtgaaaagagtgcagacagatgaagaatacagggaaagcctgatcaaggtcggagaatccgcttctgatctgcccgcgctgaaggcgggatcgcctttcagcaatcttcttcaaaagctcagcccgaaatatgacacgtacgtgcgacttcagcttgaactgaaaaaagaagccgacgaggaactcggctttgattcagaagcatatttaaaacagatgcttcaatcaaaaaaacgctaaggttcgtttccttagcgttttctttcttcagcctcagtgctgcgcgttaatgcggtcaacgacattagcgatgagctgctcttttcctaagtcggaatcttcgtcaacgcttgctactgtcaaaatgatggccgctaccgcaagagcgatcgtctcaatggcggccgccgcgtttaaaaatacccatacagccgttgcgcattggccgatggccgttgattttcctttgtccatgctctttttgtcaaactcttctttcagcactttcgccataatctgcgaaccttgatcaatgacgctgttcactttctcataatcgccgctgtagaccgccgctttcaactctttaaaataatccggcgatgactttttaatatcagcgatcacctgatcggaaacttgctttaattcatcctgatcaatctttttgacagccttggtatcccatacttcaggaaggagctttgcgacctcaccttgtccgaaaaagatgccggaaaaaatgtcttcacccgaataagagaccgacggctcagttttcgccgcggcatgcgggccgactaatgcgaccattaaaacaaacaccagcatcatggcagctgcggacttcttgcttttaaccatataatttcctccttttccttttattgaaaaaattgtatctgataaaaaggggattgtaatggttcaaagctactgttttctctgccggcaccaaaaacaggaccaaaataccagccaccgtaatggaaaacgaggtaagccccagcataacggcaaagatttcgtgcataaaaatggagataaacaatatcagacgccaatatgttttcggagcgaacaaagcgcagaacataatggtttgcacaatgagcgtgccccacgtcgggatgatgacaagcttggactgcaggataaagtcaaacagaccgtgaagcgcatccggcagacccagcatcggatcgttcaaatagtaataaacggcggttccgttctgccattcttcttccatcagtttggcaatgacagagttaaagtacagcatcgcgacctgtattctgatgattgtcagtgtcgcccagcataaggagcggtaataaggctcaagcggtcttttctcaaaagacgcctcgtacggagaccagtgccatttccgcggatcggttaatgtcagcgggagcagcagcaacgtaaaaacggcagccacttgatctcccccgtcaagagtaacggcggagttttggaagctgtacgaaatccaccagtgaaaaaaaccggtgaggcggggccgccagccaatgacgacaaggattaacatacagatacaaacggctttgacgatctcaatgtaacggaaatcgggaaacagcagaaacaggctgaacgtgtcggaaaagctgagcatttgattttgcgttttgaagaagacagacgccggattgaacagcaatgtcagcagcgtgccgagcgcgattaagcttctggcaagcccgtacacatttgtccaaggcggattcttcatcatccataaggtgagctgcttttttgcatcctgaatcaattgacatccactccgatgtatttttggatggttcttttcgtttcggtatgctggctccatgcccatggggtaatgcgttcatatgtaatgatcattttccctttcagccttggggagggagactcatttttcattttcaaaaatgtggtatccttaatgtcttggccagtcgtgaagtcgttccacttctctttggaaggcagcttttccagcataaggccgagctctatcccttgcgtccggccgtagcggtttaagccgatgacatttttcagagaattattcggccatctgagctcctcatcggcatcaagaagatagatgttcaagctgtcttctctcggatctttactgaaaaatccccagctttgcggataaatcatggaaacggttttggattgatgcttggttaattggatggcggagcttggcagtgccgcgatgacggtaaaaaacaaaacgatgatccaggcggccatgataaaaagaaagaatgaaaacatgctggtttgcttcttgtcagtcaattgaaaccctcctagcttatggaaatttcattgacatgattatacaccaatcaacaggtaaaatattgataaattagatttttcgtactaatatactattatatgtaaaaaaaggagtgtgcatatgtttttgatgaatgataaagtgctgtggggagctgtggttctcgcctttattctgtcgattgtgttttatccgtttcttcctgctgatatggccattcactatgacgtgtcgaaccgtccgaatacatcaatcaataaaacggccggcgtcctgatttttcccgtgctcatgatgatctgcatgttattcagaaaaaaggtcgtccagctattcctcatcgtttactgtctgctgatcgtgcatattgcagtgatgtggctggcactgtaaacataaagaaaaccggagcccttaagctccggtttttcttatttataaaatactttctcaatgttgtatttcgactgaagggtattgatcgcgtacgtttcgtaaatctccctttccatcggatcatttacgacacatacttcaattttatacacttcgtccctgtgatgtttaacaggcgacacattgtcttcaaaatgctttttgattctttgtcttaatttacgggctttcccgacaaacagcagctcatcatgaatgttataaaacataaagatgccgcctttgtctctcggaatttggtgaaaatcaatgaaaccgtaaatcgctttaatcgccggttcattctccgacggtgactgctgccgttccgtaatggttacatcaggagcaggaaggtttatttttatcaaatgggtcacgtcctcttattcattaaagctccatcctatcataagaatgcgccaaaagctattttttattcaagcgccccggccggatcataaaggctcaaatcaatttccgtctgctgcccgagcgcgagtttcgccagttcagcccccagatacggcccgctcgtcagtcctgaggcgcccagcccgttggcaacgaggagtccgctgatattcggcactttgccgatgacgggaagaaaaccgggagtaaacggcctgaaaccgactcttgtctctattacagtactgtctgaaagccccggcgccacggttaatgctttgtcaaaaatctcgcggagaccgccggccgtcacccgcaaatccatgccggtatcgttttcatgagtcgcgcccgctatgattctgccgctgtcaaaggcgagaatgtattgatcgtttggaggcatgacgacgggccagccgcccgtatcctctccctgaagctctaaatgaacgatctgcgccttttgaaatgatactgaaaagcggatgccgagcggctcaagcagctctcccgcccaagcgccggccgttacgagaacctgatcggcagtaagcgtgcgttctgcggttttcacaccgatgacggcaccgtcctctgtcaatattgacgcttcttcattgtaaaccgccgcgccgtgcttaacggccgcgtttaacagcgccttacgaagcgccctcccgttcacccgggccgcgccgctgacatgaaccgccccatattcctccgacagcgcggggaacagcgccttcgtttcttccggagtcagtcttgtaatgtcaccgatttcaggggcgtcctctcttcttttataagctctttcctccatttggctgagctttttttcatccgtatggaggctgacggctccgaccttttgataaccggtttctgtttctccgtccgcttcaagctgctgtatcaattggttataatagcgggctccgccttttgcgatcgcataccatgcctgattgcggcgctgtgacagccacgggcagacgatccccgccgcggcgtcagtcgcctgccccgggtgcttccggtcaatgaccgttacatccgccccggcctttgcgagatgataagccgcggacgcaccgagaatgccggccccgataatcaaataagacttcatgtataacaccttttctatctgttttgtcttatttattttaacaaatggagcgcccggttcctactggagtcctgacagcaatgatgagtttcgaaaacggaaacgtataataaaaggaatacgttcttgtctgaaagccgttttcctcaagaatctctctgtattgtgatgtattttttatatctgacacggccaaaatgccgccaggcttcagcaccctcaccatttccgcaatcgcccgttccctcttttttctgcctgaaatgttgtgtacgacaaaatgcgaaatgacaagatcaaacgtctcatcaggaaacggcatgtcttgcgccagtccgtcatacaaatcaatttccggcgctctttcagcctgtctgttcttttcaaatgcgtctcttccgtttccgaccaggtcccagcttgaccatttgtcaatcgctgagacgtcagcgcctttttgagccgcggcgatggctaatagcccccgccccgtaccgacatcaagcaccttcatgtccggctttaaaccggatagcgcaagaatgcgatggcggtgtaaaagtttaatggccgttgaatacaagagcatccaaagaccgagcaataaaaacaaggtgcccgtcagccagccccagtaaggaggaatcatgccgtataacgtgcctgcggcataaaggagcgcaataaagataaatccaaacgctccataaggcgcatcaattccgtatcgtgttgtcatactgtcaagtcctttcaatatttatccaactattataccataatattcaaaagccgaaaggagatacgaccatatgaaacgcggcattacatttaacatcccaaatcaattcggacggtttgcggcagatatattacaaccgttccccatctcttcctatacgtggtttatcggtgatggagaggcgtatactgaattcaaagaagacaccgatacagacctgtttcctcaaaatcagcgcatcattcagggtcaagaactccgtcagcgtctggaaggaaacccttattatatgatttttgctgaattgaaagctttcccgggcgggatggtaacggaaatcaatacgtacgaggagtatttggagagttcctgtgagcttgtgcttctcattgtagattgctcgtatgtaacgttatattgcaaagatccggatatgctcgaagccctttatcagcaggctgtacaatgcgggtttcaccgcgttgactatgttacagatgagaatgacgcgagaacgggattgtctgtctgatgaaggtgcgttctttttatgaagcgcctgatagggcttattattcaaaatattgacaaattcgtgtgttttcaacaaaaaaacaaccctctcatgtatactgagtgcgtaacttacatatgaaaggggtatggcaatgaaaatcagtttgaagaaaaaagcaggtttttggaagaagacggcggtttcatcccttattttcaccatgttttttaccctgatgatgagcgatacggtttttgcggccgggctgaataaggatcagaagcgccgggcggaacagctgaccagcatctttgaaaacggaaagacggaaatccaatacggatatgttgaagcgttggatgacggaagaggttacacttgcgggcgggccggctttacgacggctaccggagatgcgctggaagtagtcgaagtatacacgaaagcggtgccgaataacaaattgaaaaagtatttgcctgaattgcggcgtcttgcgaaggacgaaagcgatgacatcagcaatctgaaaggattcgcttctgcctggcgctcacttggcaatgataaagccttccgcgctgcccaggataaggtaaatgacagcttgtattatcagccggcgatgaaacgttcagaaaatgccggactgaaaacggccttggcaaaagcagtgatgtacgatacggtgattcagcatggcgacggcgatgatccggactccttttatgccctgattaaacgcacgaacaaaaaaatgggcgggtcaccgaaagacggaactgacgagaagaaatggctcaataaattcttggatgtgcgctatgacgatctgatgaatccgtcagatgaggacacccaggatgaatggagagaatcggttgcccgtgtcgacgtttttcgcgatattgtcaaagagaagaactacaatttaaacgggccgattcatgtccggtcaagcgaatacggtaatttcactattcaataaacaaaaaaaccccgccatatgggactgacccccgtttttgagacagggatcaaaacaccttcatacagccaattgccgatattgtatcggcgattggctgtttagtttcgtttgaatacgaatattgttataataatgaatgtattctatggcagtgcgttctacgatggcggtcgtagttcgatcaatgctgttaagatagaacgtttcagactttagtgaggaatgaaacgattcgatggaggcattatcagcgggcgtccctttgcgggacatgctcatggtaatgccttttgttttaacagctttctgatactcataagatgtataaacagaaccttggtcactatgtaacacgcagttttcaggaagtgttggcagctgatcaagtgtgtctaagacaaagtctgtgtcctgcttatctccaatcgtaaaagcaatcacttctccattgtataaatccaatatactggaaaggtacaattgtttctgtccataaggcaaatatgtgatgtccgttaccagtttttcaagagggcgatcagactgaaagttccgatccaatatattatcgaccacagaatatggctgcccactttttttacgctttttcatcttaacccgacactgccattgatttttctgcataatacgttgaacagatttatgattaatacttattctcttttttagtatggctgtgatttttcgatatccatatcgatacttgtgttctcggcacaacgtgccgatttgtttctccagtcgcatcttaggattactcttagtcagattctttctccatctataatatgaagtgcgtgaaatatctaaatggacacagatgtcctgtaccgtcatcgtcttgcgcaattcttctaccagtttgattgtcgtttccctatcagcttcctttccaattcgttgtacttttttaacacttcattctgttgtctcagataacgattctctgcctggagtttctctaattcagaagaatactccggaccctttccataagtatattgctttccaacaggctgttcgaatcggtgggtatccccagccttatgccatctaacccatgtctgaacctgagtcttatttttgatattcaattcctgcatgatctctttcataggcacgcccgccaatctcattcctacagccttctgtttgacttcaaccggataactcactcttgtccccatagaaaaacacctccaagttttatttcggataacaacggtccgttttcaaacttgaaggtgttttttgtttgtctcatattatggggtcagttccatatggcggggttttactattaaccgatggagccttccatttcgaacttaatcaaacggttcatttcaactgcgtattccatcggaagttcttttgtgaacggctcgatgaagcccataacgatcatttctgttgcttcttcttcagaaataccgcggctcatcaagtagaaaagctgttcttcagaaacttttgatactttcgcttcgtgctccaatgaaatgttgtcgttcaggatttcattgtaagggattgtatcagaagttgatttgttatccataatgagcgtatcacactcgatgtttgaacgggcgccgtccgcttttcgtccgaagtggacgataccgcggtatgttacttttccgccctgtttggaaatcgattttgatacgattgtggatgacgtattcggtgcaaggtgaatcattttcgcgcctgcgtcctgatgctgtcctttacccgcaagagcgatagaaagcgtcatgccgcgcgcgccttcgcctttcagaatgacagccggatatttcatcgtcaatttagaaccgatgtttccgtcaacccattccatcgtcgcgttttcttcacaaaccgtacgtttcgttactaagttgtaaacgttgttcgcccagttttgaattgttgtataacggcagtagccgccttttttgacgatgatttcaacaaccgcgctgtgaagcgagtttgttgtgtacacaggagccgtacagccctctacgtaatgaacgcttgcttcttcgtcaacgatgatcagcgtacgttcgaactgacccatgttttcagagttgatgcggaagtaagcttgaagcggtgtttcaaccttcacgcctttaggcacgtagatgaaagatccgccggaccaaacagctgagttcagcgccgcaaacttgttatcagtcggcggaatgactttcgcccagtgctcgcggaaaatgtcttcattttctttcagcgcgctgtctgtgtctttgaagacgatgccttgctcttcaagatcttctttcatattgtggtaaacaacttcggattcgtactgtgcagaaacaccggcaaggtatttttgctcagcttcaggaataccgagtttgtcgaatgtctgtttaatttcctcaggcacttcatcccaagaacgctctgaacgctcagacggctttacgtaatacgtaatttcgtcaaagtttaaagagtttaaatccccgccccactgcggcatcggcatgttgtagaaatgctcaagagatttcaggcggaaatcaagcatccattgaggctcttctttcatgcgtgaaatttcttctacgatttcttttgtcaatccgcgctctgaacggaaaatggaaacgtccttatcgtgaaaaccgtacttgtattcaccaatttcaggcatttttttagccatccattttcactccaatcttttaattgccgcctttttcgccagcgactcctttttcaagtgctttccatgaaagggtggcacatttaatccgggccgggaatttcgaaacgccttgaagagcttcaatatccccgagatctatcgagtcgtcatactctttcccttgcatcatgtctgagaaaatcttagacatggaaagggcggtatcaatatcttttcctttaatcgcctgcgtcatcatggaagctgaagccatggagatagaacagccttccccttcaaacttcgcttcctgaacggtatcgccgtcaagcttcattgtcagtctgatccggtcgccgcaagtcgggttgttcatatcgacgacgatgctgtcatccaaaacccctttgttgcgcggatttttgtaatgatccatgatcacttgtctgtataatgtatctaaatttgcattaaaagacatttgtaaagtactcctttgtcttttggagggcttccgcgagcttatcaatctcttcctctgtattatacagataaaaactcgctctcgcagtagcagatacatccagccatttcatgagcggctgggcgcaatgatgtccggctctgaccgcaatgccctcagcatcgaggacagtcgcgacatcatgagggtgaacctcatcaagattaaatgtcacaagtcccgcccgctctttcggaccgtataccgtcacgccgtctagctgctcgaaacggtcaagcgcataggctgcaagcttatgctcatgccgggaaatctcgtcgagtccgatctcttcaagaaaatcaatcgcggctcccaatccgatcgcgcctgcgataatcggcgtgcctgcttcaaatttccacggaagctctttccaagttgattcataaagccctacaaagtcgatcatctcgccgccaaattcggccggctccatattctcaagcagttctttcctgccgtacagcacgccgattcccgtcgggccgcacattttatgggaagaaagcgcgaagaagtcgcaatccaagtcctgaacgtcgattttcatgtgcggtgtgctttgcgccccgtctaccacgatgactgcgccattgtcatgagcgattttggcgatctctttaatcgggttgatcgtgccgagcacgtttgacacatgagcgactgccacgatcttcgtatggcttgtgacagtctgccggacgtcgtctaacgaaagcgtgccgtcttcctgcatcgggatatactttaaagtcgcgccggttgcttttacagcctgctgccacggaatgatattcgcatggtgctccatttgggtgatgaccacttcatcaccgggttttaagctggcgcgggcatagctcagcgccaccatattcagtgaagttgtcgtgccttttgtgaaaatgacctcagccattgatttcgcattgataaacttacggactttttcacgcgcaccttcatagccgtctgtcgctctcgtgccaagagtatgaacgcctctgtggacattggaattgtatttgctgtaatactgatccactgcttcaatgacagcacgcggcttctgagaagtcgccgcgctgtcaaggtacacgaggtcatgtccgttcacttgctgatgaaggatcgggaactgttcacgaatatcggtgatattcattattttactttcctttcgatgacggagacgagctgtttcttaactccttcaatcggaagctcttttaccaccggagcaaggaatccgtaaatgactaagcgctccgcttcttctttcggaattccgcggctcattaagtagtaaagctggatcgggtccacacggccgacagatgccgcatgtcctgcagttacatcgtcttcatcaattaaaagaatcgggtttgcatctccgcgtgctttttcactcagcatcagaacgcgggattcctgttcagcgtttgctttcgacgcgccgtgctcgattttgccgattccgttaaaaatggaagatgcggcatctttcatgactccgtgcttcaggatatagccttcagaagccttaccgaagtggatgatctgcgtcgtaaagttttccgtctgttctcctcttccgacaactacggttttcgtatcgccgtatgtgccgtctccgtagaggtttgtcgtgttttcagaaatcgtgtcgccgtcgttcatcagtccgagcgcccactcgattctgctgtcgcgtccgcgcgcggctccgcggcggttgacgtatgttgtgacgcctgctgacaggttgtcaacagcgccgtacgtcacgctggcattatcacctgtgaccacttcactgataatgttgaatacagcttctttcggattcaccgtgctgatatagttctcaacgtaagtgacggagctgtggtcttcagcgacgatcagcacgtggttgaacaatgccgtgtcattgctttcatgaacgtaaacggcctgaacaggcgtctccacctgaacgtttttaggaacataaaggaatgccccgccgttcattaatgctgcatgaagcgcagtcagtttatgttcgtcgaccttaacgccgtctttcatgaaatacttctcaacgaggtcgctgtgctcacgggcagccgttatgatgtccgtaaagatgacgcctttgtctttcagttctttagaaagagaaaggaaagcgggcgtttggtcacgctgcacgtataacgttttgtcttcgttttcgatatcgatcagcgcttttgcttcatcagctaaatcttctaaagaagcaagcggcgcgttttctactgtatgcttgttgaactttgtaaagttccaatttgtaatttttgttttatcaggcttaggcagcggcagatcttcagctttttcaagagcctgtaagcgcaggtttttcagccaggcaggttcttgatgcttttcggaaaagcctttgacatattcctgatctacggatagtttcgtttccaatgtcatgattatccccctaacgcttacgcttcttggcctacagtttcgtcttcaatgcctagttcttgtttaatccagtcataaccttccgcttcaaggcgctgtgcaagctccgcgccgccggatttcactacgcgtccctgcatcataacgtgaacgacatcaggcgtaatgtagttcagaaggcgctggtagtgagtgatcattaagcagccgaagttttcgctgcgcattctgttgattcctttagaaacgactttaagcgcatcgatatcaagacctgaatcgatctcgtcaagaatggcgattttcggctcgatcatcataagctgaaggatttcgttgcgttttttctccccgcctgagaaaccttcgttcaggtaacgctgcgccatttcagggtccatttcaaggaactccatgttttcgtccattttgcggatgaatttcataagagaaatttcatcgccttcttcacggcgtgcgttaatcgcagagcgaaggaaatcggcatttgtcacaccgctgatttcgcttgggtactgcatcgccaggaaaagacccgcctgagcgcgctcgtccacttccatttccagtacatccttgccgtcaagcgtgatgctgccttttgtaacttcgtatttcgggtgtcccataatcgctgctgagagcgtggatttaccggtaccgttcggccccatgacagcgtggaattcgccgccttttatttcaaggtttacaccttttaagatctcttttccttcgatttcaacgtgaagatccttgatcgttaatgttgaagcagccatatctatacctccaaaatatataatcattattctcaatttattctcattctaattttataacaaatgaaaagtaaatacaactttttatattacccggaacattcctaaagtttatcaaagatcaaggcgtaattaaagctgtttgaaacagaaaaagggcggaaatccacccttttttactgaccgattttctcattaagctgcgctgcgaggaacttgcttttttgatattcaagctccctctgccgttcgacttccatcctttttgaaagacgccgtccgtattcctcgtagccgatgccgtgtgacttctgcatcgctttttccatttcaggcgtatagtcaaggtccagtctctcgtggctggtgcagataatgaatcaatcccttcatatatttgtttctattgtaacaatgatccgctgctccggccaaagagtgtgtgcccctgaatcctttcgaatgtgccggaaaccggcgctcgctttatctgaaaaacggtattcacacgattgctcattctaatgcgtcgtatgtccgaattcctgaatgcactgctgcacgagggtcactccctgactgagagccgcgccgcccccgaatgccgccgcgacgccgatgacctcaaggatgttttcttctgtcgccccttggtcaaggcagcccttcgtatgataaatcatgcaaaattcatcttgagcgctgatgctgatgcccagagcgattaattgtttctctttttcagttaatgaatccgctgagaaacactgttcagtaaattcattaaacttccgccccatcatcggcattttttgctcgaatatgcctaaaccttctttatattgtttcaatgcgtcatgcacgcttttgccgttatcctggtattgagccactgccattccctccaataagttaaccttcctttttattatggacagttctctgattaatacccgaaaaaaaccccggatgattcatccggggttttcgttttattcagatacgggaagcacggctccgtcgtattttttctcaataaagtctttgattttcttagagtgaagcacttccataagcgctttgattttctctgatttttcgtcacctttgcgtacgacgatgatgtttgcgtacgggttgtttttcgttgattccacttgaatcgcatcttttaacggattcagtttgttttgaatcgcatagttgacgttaatgaagactgcatcgccttcttcttcattatatgctttcgccgttaattcaggggcgatttttttgaatgtcaggtttttcgggtttttcgtaatgtttttcgtagtggcttcaatcgtttttaccttcggatcaagtgtgatcagtccggctttttcaagcatcgccagcatacggccttgttcagcgacattgttagtcatgatgatggtcgcgcctttaggcaggtctttcagtgatttgtattttttcgtgtaaattccgaatggctcaaggtgaacggctccggcattcacgagtttgtaatctttattttctttcatttcctgttcaaggtaaggaacgtgctggaagtagttcgcatccacttcattatcagctaacgctttgttgtacattttgtaatcgttcagcacttttacttttaatgtgtagcctttttccttcaagagcggttccgcttcttttaatatttcagcatgcggtgtttttgtcgcggcgacgacgatttcctttttattcgagccgtttgacccgcaggcggccaaaactcccgcgaacacaagcagcaacgcacttaatacaatctttttcaatgtaaatcctcccttatcttttgtctattatatttgtaattacatcaccgataatctgaatgataaagacgatgatgagtataaatactgtcgctacaaacgttacatccgtattattggactggtagccttctacatatgcaaggtttccgagtccgcctgaaccgatggcgccggcaatggcggtagatccgatcagggcgatggccgtaacggtgatgcctgaaattaacgcaggcattgattcaggaatcagcactttgaaaataatcgtcgatgtctttgctcccattgatctggcagcttcgatgactcctttatcgacttcccggagcgcaatttccgcaagacgggcgtaaaacggcgcggagccgataatcagcgccggcaatgcggcgttcggtcctaaaatcgatccgaccaaaatcttagtaaagccgagaagcagaataattaaaataagaaacggaatagacctgaaaatattaacgaccgccgcaatcacggtgttaatgattttattttcccataagcttcccttgcccgttaaaaagagcagaagaccgagaaccgctccgatgataaatgaaaaaactaaagcgatgaccgtcatataaagggtctcgtatgtggccgtccacagctcggttatatcaacgttcgggaaccatttttcaaacatttgtgatcacctctgcttctacctgtttgtctttgatgaaccggatcacgttttctacttctttttcctgaccgtcaatatgaatgaataaagaaccgtaggctccgtccttcgtctgtgaaattttcccctgcagaatattgacgtccacatcaaagtttcggatcatttccgtaatgaggggctgctcggcggcctgcccgacaaatgaaagctgaatcgtttttcctgtcgctgtttcctgcagaaaatgctggatggtttctttcgtctcctctggttctgtcacctgctgaacgaaacgcttggtcatcggttcgcgcgggtttctgaaaacttggagtacttcgccttcttcaacgactttcccgttttccatgacggcgactctgttgcagatttttcggatgacgtgcatttcatgggtaatgagcacgatcgtcaggccgagtctgtcatttatatcggataaaagatccaaaattgaatcggtcgtctgcggatcgagcgctgatgtcgcttcatcgcacagaaggactttcggattattggcgagcgcccgggcgatgccgacacgctgcttttgaccgccgctcagctgcgacggataagatttttctttcccctttaatccgaccagtttaatcaattcatcagcgcggcggacccgttcgctttttttcacgccggcgatttccagcgggaacataatgttctcccggacggtgcgcgaccacagaaggttaaaatgctggaagatcatgctgatttcctggcgcgcttttctcagcccgcggctgcttactttatttagttccgtccccgcgacttccacggttcccgacgtcggcttttcaaggccgttcaggagacggattaaggaacttttaccagctccgctatatcctataattccaaatatttcgccctttttgatatcaagagtgacatcttggacagcattgacatccccatgcttcgctttgtaaatttttgaaacattttgaagatggatcaaagcaatcacccgccttacactattctaagaaatcttccgggtttctccgcaaaagaaaagcctttctgcaaaaatgagcagaaaggcttattgaaaaaggcctttctctcatctttcaaagcagaccgcttcgagtgaattggcaccatttcaacattgttgatggttgccgggcttcatagggcacttccctccacctctcttgataagagaaaacatatcgtattttcgtccggaaattcttactgtagaatagcacggcgaatgataaaaagtcaataaaataaatattggaagctattgtcacatagtagattggcagttacggccgtttactgatcgcctgaaaaaatccgtttgtcagccagaggatggcctccagcttcagcagagctctgaatgatcctttcactttgagttttccgctttggataagcttttgcaaagagacatcaccatgcaggagatgaatgatttccgtctggtttccgtaaaaggtcaaattagatttttccttggaaaccgacgtttttctcatttctccctgtccgttaattgagaccgttaaggcttctgtttctccttggaatgtaatcagcagcgttgaggcgtttaatagcggtttcaaaaacagatgctgtccgtcattctctgaaacttctattttctccactcgtataacctcccgttttaatggccatacatacactttctctttttaacggacagaaccctttataaaccgcacgacattttcctgtaaatattgtcacatcgggaacgtttgcgatgttttttgtttaatcagctcatataaataggaaacggagcggaaggcgtatcctttctcaacaagctctccgcctttaaacagcaaaaagcacggaacgctttcaatctgataggctttggcgaatgcgggggaataattcacgttgtttttatagaaggcggcgccgggcagcatttcttcgacgacagttagcattttggacgccagctggcatgtgccgcaaaacggggtgtacaaatacaggagataaacgtcatcctgaatcgattcgagttcattttcttggagttctttcatgtttaccacctcaggtcgttctttttcaaaaatacagtgtcagcatcaaagccggctctgatcagcacagatgcgagatgatggcccgggcacgactcgacttgcctgtatgttctgtctatataaatatggcgcgcttcgggaagctcccgtttcagctgttttcttaatttttctccggagtcatctgcgtccgttaaaatatagacgtctctgtcaaacaggcggtccgccaaatcttccagttcggtttggccgatcgttccgtttgtacagacgatttccgcgggttcgatgagcacttccctgactttgattttatcagattttccttctacgataatgaccttttcatctccgttgtacataagcgcgtcacctgccgattgttttagcgtcagattgaaaaagaaggcagtgaaattcaccgccaactgttaacaccagccattctcataatcgcaatcgacatatttcggatcgctgccgtttatgacatcggctgttttataaaatttttgattttcaaatgaaaagccctgtttgagctcgtactggtccatgcctgtcatctcgccgatggcttcattttcatgaaataaggaaaaccggccgttttgaaagcggcccgtaacgttctccgtcacatcgaccttttgtttatcaaaagccattttagacacctcccgttacagatagaatgtccaaatggcccctttgctatccgatcagtcttcctgtgtcatttcgtcatattgctcggaagtcatgaggttttcgatttcttcagcatcagccggttccacgacgatcatccacgctttttcatacggagactcgtttacgaattcaggactgtcatcaaggtcttcgttcacttccgtcaccgttccgttaatcggtgcgtacagttcggaaacggttttgacggattccacgctgccgaatggctcgtccgctttaatttcggcgccgacttccggaagctcgacaaatacgatatcgccaagttcggcttgcgcgaaatgtgtaatcccgatccgggcttttccgtcctcaactttgacccattcgtgctctttggaataacgcatatctttcggtgtgctcatctaaatccctccatttttttcttataataagaagataccataattctttgaacctggcattacatccaatatttttcgaattggtcttctttaaagccgacagtgactttttcgccgtctgtcgtaatcgggcgtttcaggagcataccgtctgatgccaaaagttcgagctgttcatcctctgacatatggtacagtttttcctttaagttcagttcgcggtatttcattccgctcgtgttgaaaaactttttgagctcaagaccgctcttttcatagaggtctttaatttcttctttcgacggagtttcctccgcgatatgtatttcgtttatttccttaccgcggtcttccagccattttttcgcattacggcacgttccgcatttagggtaccagtaaaaatttaacgacatcttcttcaccccttgtaaatgatcgtcgttattttaacacaatcacttgtaaaaacctataacgttgcttcatgaaaaagcgcccctgatgaaggagcgctttcagcatgtgatcagaccgtatatttttcttcacggaagacggcggctgccgcttcacgttttttctgaatgaggtttttcggcgtcaggcgcgtcagtttgcgcagcacggaaagcatcatgcggagggaatctccttcctccatggcgatcagtgattctttggcgtgcgcttcaatgttctgaagggcttcctgggcaaagatttccgtatataacagcttctgcgcggctttttcggcaccgtccgccgcaattgctttttccgttctgaggacggcagattccaaagcgtacagcgcgctgacgatatcggcaatgttcaccatgatttcctgctcgccttcgatctctttgccgtatttctgcgccgcgagacccgctgtcaagagggcgatctttttcgcctgtctgacaatgtatttttcctgttcaagaggttctgagcccggctcttcaggcatcagcatcatgagttcttcttggagcgcttttgctttttcaaagagcggcagctgaccttttacggcttttttcaggaacgtgctcgttacgatcaggcggttgatttcatttgtgccttcaaaaattctgttgattcttgagtcgcgataggcgcgctccacttcatattcctgcataaatccgtaaccgccgtgaatttgaacgccttcgtcggcaatataatcaagcgtttcagagccgcacattttgttgagcgagcattcaatcgcgtactcggcgattgacttcgcgacttcgcgtccgtctttttgctcctcttccgtcagtctgctcatattatcttcgaataagcccactgttctgtatacagagctctccatggcgtaaagccgagctgacatcgtcgcaagcttttcctgagtgagcgtgaatcttgagatcggtgttttaaattgccgacgctggttcgcataagcggcagacagctcaatcacccgttttgaagcgccgattgtgccgacggcaagcttgtagcgcccgatattcagaatattaaaggcgatgacatggccttttccgatttcgccgagaaggttttctttcgggacttccgcctgatctaaaatcagcgttcttgtcgatgagcctttaatccccatttttttctcttccggtcccgttgacacgcccggatagttcttttctacgataaatgcggaaaacttatctccgtccactttagcgtagacgacaaagacatctgcaaaggcggagtttgtaatccattgcttttctccgttaagaatatagtgtgtgcccgcttcattcaaaacagccgtggttttcgcgccgagggcatctgaacctgaaccgggctcagttaaggcgtatgccgcgattctttgtcctgaagccaagtccggcaaataggtttttttctgttcttccgttccgaagaacacgatcggcaatgagccgataccgacgtgagcgccgtaagacagcgaaaagctgccggcacgtgaaaacttttccgtaatgaaggctgaactgattttatccaggccgataccgccgtactcttcaggcacgtctgctccgaggaggcccaagtctccggcttttttcagcagtctgaccgaatgctcaaactgatggttttcaatttcatcgatataaggaagcacatcgtttacgacatagtcttctgtcgttttgccgatcattttatgttcgtctgtaaagtcctccggagtgaatatttgatcatatcccgtctcttcaatcagaaagctgccgccttttttgacgttgaccgtttcctgtttcatattcatttccccctttttttaaatgagttcaaatacgccggcagcgcccatgccgcctccgatgcacatcgtcaccacgccgaattgctcgtttctccgtttcatttcatgaatgagtgacagggtcagcttcgttcccgtgcatccgagcggatgtccgagcgcaatggcgcctccgttgacgttcaccttttcttcatctattccaagcgatctgatgacttgaatggcctgtgaagcaaaggcctcattcaattcaaaaagcccgatatcctgtaattcgagtccggcaagcttgagcgcccgcggaatggcttcaatcggaccgattcccattacctcaggcggaacgccgcctacggcaaaggaacggaatttgacaagcggcgccaatccgagcgacgatgctttttcgcgatccatcagcatgacagccgccgcgccgtcacttgtttgtgaagagttcccggccgtcacggttcccgttttagaaaaagccggacggagcttcgccaagacgtcagccgatgtgccgggacgaacaccttcatcttgagaaaaggtaaattgttttttccgcggcttatggtcatcaccgacttctgtcagcgatacttcaaccggcacgatttcgtcattgaatttgccttctttaagggcttttgcggcattctgatggctgcggacggcaaatgcatcctggtcttctctggatacgccgtacgtttcggcgacctgctccgctgtgtgccccatgctcatgtaatactcaggcgcatgctccgccaaagcgatattcgggcgggtcacatgccccatcatcggaacttgcgacatggattccgcaccgcccgcaatgacggtgtcgcccgcgccgatcatgattttttcagcaccgtaagcgatggattggagtccggaagagcagtagcggttcaccgtaatggccggcaccgtatgaggaagccccgccagcgcaccgatattccgcgccatatttaatccttgttcggcttcaggtgttgcacagcctataattaagtcatcgatatttccttcatacccgcctgcccgtttcagcgtttcttttacacaaagcgcgcctaaatcatcaggacgaacggctgcaagcgatccttttttcgctttaccgaccggggttctcgcaccggccacaatgactgcttctctcataaacaccctcctagttccgtaaaggtttgcctttgacgagcatatgctgcattctcgcttgagatttcgcctcgccagcgaggcttaaaaaggcttctctttcaatctcgagtaaatattcttctgaaacctccgtgccgaacgggactcttccgccggcaatgacatgggccagcttctttgcaatcttcatatcgtgatcggataaataacccgaccgtctcatttggtccgctccgagcagtaacgccgcacatccggtttccccggtgacttttacttttttgcgggcaggcgggcggtatccgctgtcatataaggaagcagccagctgtttcgcatcgtgcagcaggtgatcctgattcatgctgacgcggtcagccgcggacaaaatctgcatatcacgggcttcgtgtgccgaaccggacactttggcaagcgcgattgtttcaaaggttttgatggccgcgtccatcagttcacttccgccatccaaataattcatgtacagctctttgtttcctccgccgcccggaataaggccgacgccggtttcaacgagacccatatacgattcgctcgccgcctgaacgcgtgccgccgggagacagacttccgtgccgccgccgagtgtcatcccaaatggcgccgctacaacgggtttagcgctgtatttgatgttcagcatcgtctgctgaaaacggcggatgacaaaatcgacttccatgaagttatcatcctgagcttccatcaaaatcatcgcaaggtttgcccccgcgcagaaatgtctgccttggttaccgatgacaagacctttataattccgctccgtttcctcaagcgcattgtcaatcatctgaataatgtctaagccgatcgcgttgcttttcgtatgaaattccagcagcgcgacatcatcgccgagatcaataagacttgctccgctgtttttagtgatcacgccttttgtttcttttaacgtttgcaggctgatcagtttcggattttctttcacagccctgtattggccgtctgaatagtaaaatggtgttccgttttccttcatataaaatgtttcatggccctgatcaagcatttctttcacccagccggggagtgctgcgccttcttcttcgagccgctccgctgattttctgacgccgatggcatcccacatctcaaacgggccgagctcccatccgaagccccatttcatggcgtcgtcaattgctttgatatcatcagcgatctcccctaaaagccgggctgagtataagagtgtttgcgatgtgatattccaaagcaggcgtccggcgcggtcatcggagtatataagcgctttcattttgcctttggcaccctttgcctgtttggcggcttctaaagcgggcgtcttcattttcgagcgctcaccgtatgtcatggtcagcggatcgagttcatatattgttttaccttcttttttgtaaaaaccttggcctgatttgctgcccagccaattgtttttcagcatgtcattcataaattcaggaagcttaaacatgtctttttcagcgccgtcggctttatcatacacattttttgccacatgggcgaacgtatcaagccccacaacgtcaagggttctgaaggtcgcgcttttcggtctgccgatcaaaggcccggtcaccgtgtccacctcgccgatgctgcagccggaagaaagcatttctcttaccgtgaccagcaggccgtacgtaccgatgcggttggcgataaaattaggcgtgtcttttgcgatgacgacacctttaccaagcgtgttttctgcaaatgaagtcataaactccagcacgtcaggatctgtttcctgaatcggaatgatttccagaagctttaagtagcgggccggattaaagaaatgggttcctaagaaatgagctttaaaatcggcagatcggccttccgccatttttgtgacggagataccggacgtattgctcgacacgatgcttcccggtttccggtattcatcaacgagtgagaaaatctgtttttttacgtcaagattttcgacgacgacttcaataatccaatcagcatccttcaattgagctgcgtcatcttccaaattccccgccgttatatagtcgagattggcagccgaagtcagcggcgccggtttttgcttcagcagcttttgcatggccgatcggctcagtctgctgcggacctccgggctttctaatgtcagcccttttttcatctcatcctttgtcagctcgtttggcacaatatcaagcagcaggacgggaattccgatgttagccaagtgcgcggcaattccggaccccataacgcctgatccgagaacggctgctttctttataaacttgtgcatgagtcatcccccttgaactttgaatgaatagtcattcattttttcggcaaaaaaaatgaaacccttttcttctttcatcttaaaagattttcaggatgacttcaatagcaaatatggaatttttttaaatttttctgcttccgcatgttccatggcgcgggcgggaaacttaaacccggaggtgaagggaatggtgcgagggagaaaagatccgtcttctgccgcagtgagcgcggccagcatgaaaggaaatgcgggaccgaaacaaaaatacggcggcggcaaacggacgagccaaaatcagcaatataaaaaagacaacatggaataacatgctgcggctgctttttggagcagccgttattttttgaagatccctttcagcacaaatgccgcatttgccgggcgctcggcaattcttctcatcaggtacccgtaccaatcggttccgtacgggacatacaccctcatcctgtatccttcttcggcaagctccttctggcgctccgttctgatgccgtacagcatttggaattcaaactgctcccggggaatctgatgttcgctgatgagtgttttcgtataagaaatgatgtcatcatcatgtgtcgccaccgccgtttcatggccgctcaaaagctgcagcttaatcagctgctgaaaatgaagatcggttgcttttttatcagggaatgcaacggccgccgattctttataagcgccttttacaagcctgagccgcggcttgtatggcatcagaccgctgatatcttcagctgcgcggtacaaataagcctgaatgacggtgccgagcatcgggaaatccggcttgcaccgcttatacagctcaagcgtacggccgcatcttgaatagtcctccatatcaatcgttacaggcacgccgcgttcttttgcctccgtcaatatgtctctgacatgctgttccgcaagtttctcggaaatatccagaccgatggatgttaatttcagcgacagctcacaatccagttgattctcggcaatcgccctgattgcttttttacattcttccgccgtccttttcgcatccttctctgaacccgcatattcacctagataatcaatcgaagccgacagccctttttggttcagccgctttaccgttttcacagcttccgtgagtgttccccctgcaacaaaccttcccgcgccgaagcggattccgtaagcctgggaaaattttgtaagcattttatttttcgacaaaaataaacatatgctccgcagcaaggatgaactccctcctttttcttttattcgtgtatgaaatcccgatcgcagagaaagctaaaacacaaaagctatgcaaattgccaagatatcagttcatatatccatacagactctgatgtcaaagcaatgtattatattatcaagatattcaaacggttttaatgagtcacaaaaagagtcaataaaaatcactacttctccaattgagttttcgagctaaaacttttaatttatatttctttatccccttataatttgaaaatattccttaaaagataattgatttataatttacaatggcttatatttaaaattgataattcagtttattgaacgtatctattaagaaggaaaagcagaatttcaaaatgataattctgctgaatttatctttgcctcacaaacatacctccaaagcattattatttctttctaatagctttacgatccttcatctttaaagatggcttcccttccctaacggaatttaaagaagggacctgcctgagttatccattcaccttattttgaagaatcactatgctcgaaacatatgaaaagagggaaccttcaagtggattcaacaggaaaatctaaacgtacacttttattaattggacttattatagccatgtttttttctgctctggacggaacaatcgtaggaacggttatgcctaagattgtaggagatctcggcggcctgagcatgatgacttggctgactacggcctacctattaacatctacctccatcgttccgatcgctggaaaacttgcagatctattagggcgccgggcagtatatgtggccgggctgattatattcatgattggctcttcactgtgcggcctggctgataatatgaaagaattaattgtgtttcgaggtttacaaggtcttggcggaggcattatgatgccgatggctatgattgtcattggagatttattcacaggcaaacagcgtgccagatttcaaggcgtatttggcggtatttacgctcttgcttctgtaatcggaccgcaaattgggggatggattgtagattctttcagctggcattgggtattttttatcaatttacccgtgggaatggtagctgtgttctttattgcgatgggattgcaggccagaaaatacacgggtccgattcattttgatttcatcgggatgtttacaatgattacgggtgtagtctgtttgctgcttacactcagtttcggcggaaaagaatttgactggttatcatggcagacattttgtctgttagctttggccactataagtattattagttttgtatttgcagaaaaaaaagctgaagaaccaattctgcctatgcatcttctaaaaagcagaacttttatcttcctaaatttgatagggttctttatgagtattgggatgtttgcagcaatcaccttcgtccctttcttcatgcaaggaataatcggcatgagtgcatctgagtccgggacaatcatgatgccgatgatggttgcaatgattatctccagtattataggcgggcagctggtctttaaaatcggcattaaagcgcagattatcacggggatggcaatcatatcatttgcctattttttattatccacattagaagctgacaccagcaaattaactgcaactacttatgtagctatcatcggcttcggtatgggccttgttatgcccattattactctggcacttcaagagagtttctctaaagaaacgctcggcgtggttacttcgtcaagccaatttttccgctctatcggaggtacgtttggaattacgattctgggagcagtgatgaatgccaagtcaggaaatatattaaccgataaattagttccttttttagacaatttcccaaaacaagaaaacgcattggcagctcatctcaaagacttgatcagcagcaatcctcaagtcctgctacagaggctgttcagttctgattcattcgaacaatttccgcattctatagcaaagcacatcataccgataatgaagacagcattaatggactcccttcgcagtgtatttttcgcagggcttatactattaattgccggagtactttctgcttttcttttaccaaaaataaaaataactgaaagaaaagccggcactgatctagacaataaaccggcagctgaagtccaatcctagtgccgctgctgactttcgcatatattgaactgttaacatgaacaggcattatccgaagatttattcttctgatagtgtctttttttattgtaaatattgatgtctctcctgcaaatcgtggttattttaatttatctgtatgaaatcccgatcgcagagaaagctaaaaagaacagaattgaaggaggcgtttatatgaacaaccaagagcagcacggaaacttgccgcctgccgtcatctcaacgaaagaccatttgtatcttgaggacatgctgaactggaatctgcttgccatgaaaaaagcgcattttatggcggaacattgccagaatcagacgttaaaacaagagcttgatcagatcggccggatgcatcagaagcattatcagcacatattaggccgcttgaaccccgatcaaggcggacagacaacaacaggctatatgcaataggaggacaatacatggaacagcaaaaccaaaaaatcacgaatccgcaaacgcccgtgcccaatacggcgcaaatgaatgacagagacttggtgaatgagctgctgacgacggaaaaatacatcacggcttcatattgcacagccctgcacgagttcagccacgagtctctttatcaagatattcaggcgattttcgatgagtcacaaaaagcgcaaagaagattatacgatgtgatgtttcaaaatggctggtattccattgaagcagccgatacccaaaagcttcagcaatcgtatcagaagttccggcagaccattcagcagcagtctccctaccagcagtaaaacgaagaaggatttgatgttttcgacaagcatcaatcctttttttatttttgcacaaaaagattgacttgtcattaatccttatttatatttaactaatgttaattattttctcaaggaacaagatgaggaggagttatgaaaaacgcggatcaatatgtgtctgacatccagaaatctcttcagacgctgctgcaaaacatacagcctgaaatggtggaaagcatggcaaaacacgaggtgacgcctgcccaattatttgttttagccagcctgaaaaaacacgggagctgcaaagtttccgaaattgcggaacgcatggaggtaaagccgagcgcagtgacgctgatggccgaccgcctcgaacaaaaaggacttatcgtccgcaaacataaccagcaggacagacgcgtcatcgacatcagcctcaccaaaaaaggcgaaacaaaattcgaagatgttgttgaaggacggaaagcgatactggcgcgaaacctatccgttctgactgacgatgaactgattcagtccgtgaacatcatccgcaaagtagcggaagccgccgagaaatacgcggctgatcaaaaagaaaacgaatagaaaagaggagctgccgaaacatgagcattgaaaagaaagatccaaaacgcacattattaataaccggcttaatcatcgccatgtttttctcagcccttgacggcaccatcgtaggaacggcgattcctaaaatcgtgggtgacctcgggggattaagcatgatgacgtggctgaccacggcatatcttttaacttcgacgacgatcgttccgattgcggggaaacttgcagatttattggggcgccgcgtcgtctatgtatcaggtttattgatttttatgggagcttccgcactgtgcggaatggccagcaacatgacggaactgattattttccgcggacttcagggaatcggcggcggtgtcatgatgccgatggctatgatcgtcatcggggatttgttcacagggaaacagcgtgccaagttccaagggcttttcggggcgatttacgggcttgcttccgtgatcggtccgcaaatcgggggctggattgttgactcattaaattggaaatgggttttctatatcaacctgcctgtcggaattttagccgtgatctttatcgcaagaggactacaaggcagaaaacagaccgggccgattaactttgacatcgccggcattttcacaatgatcgtcggaatcgtcagcctcctcctcgcgctcagcttcggaggaaaggattacgcatggggctcttggcagattctcggtctctttgcgcttgcacttgccgggattgtcggattcattttcgctgaaatcaaagcaaaagaaccgattctgccaatgtacctgtttaaaaacagaacgtttaccgtactgaatctgatcggctttttcatgagtatcggcatgttcggcgccgttacgttcgttcctttctttatgcagggaattatcggagtcagcgccaccgcgtccggcacgattatgacaccgatgatggtatctatgattatcacaagtattatcggaggccagttggtttataagatcggtattaaaccgcaaatcatgatcggcatgctgatcatggccgtcggcttcttcttattaacgaccttacagctggatacaagcaagctcgcggctacatgctatatggccgtgatcggtctgggaatggggctcgtcatgccgcttctcacactcgctctgcaagaaacgttttcaaaagaagagctgggtgttgtgacctcttcaagccaatttttccggatgatcgggggaacgttcggtattacggtgctcggcgctgtcatgaatgccagatcaggaagccttttaaccgacagactggtgccttacttagactcactcccgaaacaggcaagtgcctttgccgcccagtttaaaggtatgattgacaagaatcctgaagggctgcttcaatccctgttcagccaggaatcgattaagcagattccggccgcattttcttcccatatcgtgccggttttgaaaacgtcactgatggattcgcttcacagcgtgtttttcacaggcctggcctttatcgctgccggattgatcctcacgctgtttgttaaatcaattaaactgacaaacaaaaagacagacaaacaagaagaaaaggcgaaagccgtttaacaaagaaaaatcccgcggatgccgcgggatttttttatatcatctgggaatgaccagtcttccgcctcattggaaatgggggaaaaaactcaaaaaagtaatgatgaaatccttcaataaaccttaaacatttcatagttatctttatagtacgacataataaagtcacgaaaatttcttaccgaagaagacaacagcttatgtctcatccaagataagccgactggatatgaagcagagtgatcagtcacttttataaaattcagccccaatgttctgcaaactgaaataggaagcaacgccacaccttgatccagctttataatctcgaccagtaaatgagaatctgcctcaaatgcaatatttggggtgaaaccggctttctcacaaagcgaggctgtaaaaccgctatactcttcattattagcaagggtaataaatggttcatcggcgacaaggcgtaaagaaatttctgttttacccgtaaatcggtggtttgagggcaaagccagaacaatatcttcatttaccagcacccaactctctatctcttcatcttgaatcggatgacctgttattcctaaatcaatgtcccctttttttaaacttgttatgatctcgcttttaactccgattgcttggagaatttttgattgaggggagcggttgatatattcactcatcagtcctgcaaggaatcttggattggaaatagatattctgatggtgtcagaaatttgatgttcctccaattgaatttccgtttgtgcattttcaatctcagtaaaaatcctgtttacatgttttaaaagaattttccctgctgaactcagcttaatatttctgccttttctctcaaacaaggttgttcccagttcattctcaagtctttttatagtgagacttaaagaaggctgggcaatctttaattgttctgctgctttagatatatgttcagtataggcaactgtctgaaagtattttagctgcagcaattccatctgtctgcaccccctcatttatttcaataaatatatatataccttattatgtattggattaaatgtaaatgcgaatgtaagataatagcatagttaaagaaaaggaaagggtgtcattcaatgaaaattgatgtgaaagatatagcaaaaaatttaaatacgccactaacagcccctgcttatcctatcccaaattataaatttgttaaccgtgaatatttaaatattatttaccgaacggatgaaaaagctttacgtgcagcagtgccggaacctcttgaaattactgaacctttagtgaaattcgaagtcatgtggatgcccgatgtttccggacttggtgcctatacagaggctggacaagtcatccctgtcagctttaatggtgaagaaggagattatgtacattctatgtatgttgacaatttcccggctattgcaagcggacgggaacttactgcatatccaaagaaattgggtgcccctaagctgtatatagactctgatactcttgttggcacattagattatggcagtcttcgtgtggcaactgcgactatgggatataaacatttcgaaatggataaggaaaaagcgaaaagggaaatttgccgacctacttttatggttaagattgctactgattacaatggtgatttaagggtttgtgatttggtgcggacgcaaataacgaatatagaagttaaaggtgcctggactggaccggcgcggcttcaattatttgaacatgctctggcaccgcttgcagatttgcctgtattagaagtcgtttcagcatctcatatccttacagatttaaccttaaatgcagcacagccagtttataactacttagaggaaaaataaggagacgtttacaatgagaattgcagttttaggagcaggttctttaggaaccatagttggagcatatctgtctgctggcggaatggatgtcgaattgattgattcgtacaaagaacatgtagatactctaaatcaaataggtgctaaagtagttggtacaacggaatttcaagcaaaggtgaaagccatcacccctgaaaacaaatcaggcaagtatgatttcatattactcctgacgaaacaattatataatgactccatccttaaagagttactgccttttttaaaggatgacagtgtagtatgttccttgcaaaacggtatacctgaacagaaagttgcttcgatcgttggtgatgaacgtgttattgcaggttctgttgaatttggtgctacgtttattgaaccaggcgtatccagacttacaactgagtatactcaatttaaagagtacgcttttcaaattggagaattacatggtgaaacaacagaaagaatccagcgtattaaatcggttttagaccttatcggcggaacacatatttccgataatttagttggaacgaagtggtcaaaattacttatcaataatgcattcagtggtttatcggctgcattaaacggagaatacggagacattcttgaccatgaaatcggcattgtcagtgcagtccatatcgcagatgagacgattaaggtgggacacgccaatggtgtcaaatttgcgaaaatgggcggccttgatttagaatctttggaattaagaagcgaaaatgatattcctgaacgtatccaaacatttaggtcagccatggaaccatctaggctgctaagagcaagtatgcttcaggatcttgagaaaaaacgcaaaacagaaattgattatattaatggagttattcccaaaatggcagaaggtactggcatttcaacaccttttcatgatttggttgtagcacaagtcaaatgtgccgaagaatctctaacagtgcccaattttgatacaaatataaaagcatttgaagagttattacgtatccgaaaggaaatgtgatatataggaaagagagaaagggattgctgcggcggtccttttttcttggttcagcaagcggaagaaatatacgtaaacaaacgggtgcattagttatattaaagttcttcgcctatgaattgaacgaagctcttattgattccttttcagcaaaaaaagcttccggcacctctctttgatgccgaaagcttttttattgtttttttctgtgtgcttcattgagctgtttaatatgctgtatcgcagcttttatgccctctttggcgtccgggtaggattgattccaatgtttcacgagcggaggcatgctttttgcgatatgtgtatacaaaatccactgcctgacttcttcctttacatccgggtttgtttcgccaagcaatagttccgtgtatttctcaagcaggccgtccagctgctgctgcagtttctcttccataccgttcccttccctttttcatgattatgacaatcgggcggtgagggccgcttcctgcacgatacatctgccgcgtccgtgcggaatgcaaagcggcgtgccgaacagcgggtcttgcgttacctggcagttcatcgcaaagacctgctgtacaagctcgcaagtgatgacttcttcgggacggccctctgcgtaaatctgtttatccttaatggcgaccagataatgggcataacggcatgccagattgaggtcgtgcagcaccatgacgattgtgcgtttttctttttcatttaattcaaacagcaaatcaagaatttcaatttgatgcgtcatgtcgagataggttgtcggctcgtcaagcagaatgatatccgtatcctgagcgagtgtcatcgcaatccatgcgcgctggcgctgtccgcctgacaaggaatccaccggacggtcggccatttcctcaagcttcgtcgctttaagcgcttttgccactgcgtcttcgtcctctttggaccattgcttcagccagctttgataagggtatcttccctgcttcacaagctgatgcaccgtcaggccttcgggagctgacggactctgcggcaatatagcgagctctcttgccacttccttcgtcggaagcttagcgatggcttttccttctaaaagcacagaaccgcccctcggtttcatcagccgggccaatgaacgtaaaagcgtcgattttccgcagccgttgcttccgatcaatacagtgatttcgccttttggaatcgcgacatccaattcgtcaatgataacagtttctccgtaccctaagctcagcgtctctgtagaaattgcactcataccgctaaccgctccttttttgagtttcccaacactatgtatataaacaaattgcctaaacattcaacgtgagatcatgattatattgtaacagaaattaatgactctgaatatcattatcaattagttttgggcaaaaaagcagcgggcggcagttatttttttatttccgtcatttctccgtcgttctttttcagtttcaaataaaaatggtcatagcggctgtccaaattaaaagccgagagcacctgccggacgacctcgctttcctgcatccggctgtttacggcaagttctccaaggatcatcttcatttcatcaagcgcttcctcgccctctctgtgaacccctgagagcttgtcccggatgtcagccttttcatgaccgcctttactttcatacaaaccttcatagcggttatgctctccggctccgtagctgacgcgaagcgaaaagctgctgtaaggaaccggcttcgcggatgacacgggtgtgctgtcttgttccgcttcccgtttttcttcattcaatcggcagccggcaatcagcatcagcgtaagacataaaacgcccgccgttctgatccatttcatgcgattcactcccattccattccgatcgtttttaggtatttccaagggaggcggctgtcattcattaaacaaaaaagaaccggagcggtaacactccggccggttcatctcaagattatcattcagtcagctctaaaaattcctgcacatcctgtacggctaggcggaccgcgtcttcccaaaacgaccgttccgtcagatccgctccaaggtgcttcatcgccaaatcctcaacagtcatcgaagccgtgtcacacaaaagcgcgatatatttttcttcaaaatccgctttttcccgaagagctcttgcatatattccaagcgaaaataaataaccgaacgtatacggaaagttgtaaaacggcactcccgtaatatgaaaatgcagttttgacgcccagaaatgagggtggtattcccctaatgaatcgcaaaatgcttctttctgcgccgcttccatcagttcattcagtttctcagccggaacgacgccctgcttgcgctcttcataaaaacgcgtttcaaataaaaatctcgcatgaatattcataaacatggctacgcttctttgaattttatcttcaagcaagaacaccttttcatcctttgtctccgcttgtttcaaagcggcgtcggcgacgatcatttccgcaaaggtcgaggctgtttcagccacattcatagcgtaggctctgttcagctgccgcacttgaagcatggcctcctgatggaacgcgtgaccgagctcatgcgccagcgtcgatacattcgaagcgcttccggaaaacgtcataaaaatccgggattctccgctgtcgggaaagctggtgcagaaaccgccgacccgtttgccgctgcggtcttccgcttctatccaccgatcacggaatgctttttccgtaaatgcggacagctttttgccaaacgtcgaaaattggctgacgatcagattggccgcttcatcaaatgtgtattctttcggagcctcgccgatcggcgcgtccacatcataccagttcagccgctcaagccctaaaagagacgcctttcgattcaggtattcggcaaaaggctttttatgatcggtaatgacctgccacatgacatccagcgtttcttttttcatccggttgatcgcaagcggctcttccaaagcgcttttccagccccgcgctttatagatttccgtgcggaagccggccagatggttcagcgtgctgccgaaaagctcctcttctcctttccacgcttcattaagctctttaaacacttgacgcctgatgcggcggtccgggtgcgccatcatattttccgcttggccgaccgacagctctttatcctcaaacggaatcttcattctgccgacagccgcattatacaggtcgccccatgcgtgatagccgtcaacggccaggccttcaatcagcctttcttctgaagcgctgagcttctctttgacccggtctcttctttcatttaaaacatatgtgagatcctgaagttccggtttttgcagcagctcctcccagaccggctcgtcaatccgggcaagtgtatcgtcaagggtgaccagagcggatttaaaatcactgctcagctgattgatccgcgccctccattcattcgctttctgatcatgagtgttctgagcctgaagacagccgacgaacgctcccgcttgcctgatcatgatcgctgaccgttcaaacctatcaatcagattgatcagctcccggctttcatccgcatgcgtcggagctgtaaacgcttcaaccgcatgttgaaaagcgcttagatgctttttgagctcttgtatgtattgctgaaactcttccgaccggctcccgccctcaaaaatggagtttaaatcccatgtttccttcaatccctctaatgccatcttttctttacccctttctatccgaagctgactccattataaaacaattctgacatatttccgaacgatttctccttctttccgcgagatgttatacactatgagataagaacaaacggggaggattataagatgaacagaaaaattgccattgtaaccggcgcgacgagcggattcgggctgctgacagcgctgaagctcgcccggtcttatcacgtcatcgcaacagccagacagccggagaaagctgaaatactgaaagaggccgccgctcaagcgggtgcatccgaacatgttacggtcgtttctttagatgtgacaaatgagcagtcggtgtctgacttcgggaacaccatcagcggtttcggaccgattgacctgctcgtcaataacgccggcactgcgtacggggggtttattgacgatgtgctgatggaacattacagacagcagtatgaatcaaatgtattcggtctgattcacgtcacaaaaaccgtgctgccttatatgcgaaaacatggcgggaaaatcttcaatatcagcagtatcagcggactgaccggtttcccggctctatctccgtatgtctcttccaaattcgcggttgaagggtttacagagagcctgcgcctcgaactgctgccgttaggaattgatgccgctttaatagaaccgggctcctacaaaacatctatatgggaaacgtctctctccaatcatcttacggcacccggcaaagattcgccttattaccgctattatcagcaaatcgaagcttacttcaaagccaacgcatccaaaagcggcgatcctgatgacgtagcggagctgatttatcaattggcacaaaggaaacggctgaagaaactgcggtatccgatcggcaggggcgttaagctgacattggctttccgctcactctttccgtggtccgcctgggaatcgattataaagaaaaagctgttcacttgaacctaaattataattattataatttagtattgatttttatttaatacgtgatataattaaattaacagatcacagggaggacgatgaatatgaatacacaaaacacgaaaaaaactgaaactcttgttgagaaatcaatgaacacacaattatcaaactggtttatcctttactctaaactgcaccgcttccattggtatgtaaaaggccctcatttctttacgcttcatgaaaaatttgaggaactgtataacgaagcggcggaaacggcggatgccatcgcagagcgtcttctggccatcggcggacagcctgcggcgactttacacacatatcttgaacaagcttccattacggatgaaggccaggaaaaaacggcttctgaaatggtggaatcactggttcaagactataaacaaatcagccgcgaatcaaaatttgtcatcggcatcgccgaggaacaaaatgacccgtcaactgccgacctgtttgtcggattagttgaagaagcggacaagcatgtgtggatgctgtcagcctacttgggagaataacgaaaaaagctgaacctcagttgcaggttcagctttttttatgcgttcagcttgcgctttcggtttgtttcgttaatgtgacgttcagcgtctttttgcttccgcttctgagcacttgaacagtcgttttatcgccgattttcagctggttatataagatctgtctgatatcagcgctgctgccgacatctttgccgttcaattgtacaatgacgtcatttgatttgatgcccgctttcgcagccggtgagccggactgcacttcttttacgtaaacaccctttgacagctggtcgccgaacagtccgagcgtgttttcctgataagtttccggcacttgcgccatgtcaatcatctgcacacctaaaaatgggcgctcgacttttccttttgcaagcagctggtcgactatcggttctacatcattgctcggaatagcaaagccgagtgactccacgccgttttcactgactttcatgctgttgatcccgataacctggccgctcgagttgattaacgggccgccgctgtttccggggttaatcgccgcatccgtctgaatcacgttcatttccactgtgccttgggatgtatcggcgtctaccgttctgttcagcccgctgatgacaccttgtgtgacggtgccggaaaactgctggccgagcgggttgccgatggcaatcactttatcggcaatgcggagcttggaggaatccccgaagctggccgcttttttgacattggacgagctgatttccaatacagccaagtcactgatggcatcctttccgacaagctttgccgtttcggttttcccattgtaaagagtgaccgacagtttgttcgcaccttctacgacatggttgtttgtaatgatgtacgctttttcgccgtcttttttgaagatgacgcctgaccccgtgccgctttccgtttcagagcttgaaccgccgtcaagtccgaactggctgctttgcgaagcttggtagttggacactcccacaatcgcaggctccaaatcttctaccatatccgctacgcttgaggtatttttcaaaggcgttgacgtaaaattcgaagactgaacttgtttcgtatcagaaacggcttctgtcttatgctgctcacccggcaggtttggcacaatgccaagcacgaggcctccgccgataatgccgcctaaaatcgggctcagccaagcggctctccgttttttttcttttttcacggcagccgttttttcaaattccgtaccggccgccgtctcgttttccgcttctttcgagacgggcccttcgagcagctcgggctcctgatggctgatctgctgctgttcatttctgttttgttccgtatgtgaaagatctgactgatcgcggcttctgccgtcatctcgatgatcattcatattcacgcacactccttcagcatgttttcattctatcgattacatattcatcgcatgtacaagttctattgtcccaataataaggagaaaagcaaagctccaaaacaaaatgtgtttgaacatgttatcttccccgctttttttcttcctttcttcccttatacacatcataaacaaacattgtgggataaaaatgaaaagaatatgtgaaattatgaaaatgcggcttgagtgtgttaaaactagtataatgacgttgaaaggatgtgaaatgccttgtcatacaccatttatctagttgaagatgaggataacctgaatgaactgctcacaaaatatttagagaatgaaggctggaacattacatctttcacaaaaggcgaagatgccagaaagcagatgcagccgtctccccacttgtggattcttgacatcatgcttccggatacggacggctatacattgataaaagaaataaaagaaaaagatcccgatgtgccggttattttcatttccgcgcgggatgccgatattgacagagtcctcgggttggagctcggaagcaatgattatatcgccaagccctttttaccgagagaacttattatacgggtccagaagctgctcgagctcgtgtataaagaacagcccgccgcaaagaaaaccggcatcaccgtttcttcctacaatgtgatcgaagatgcccgagaggtttatgatgaaaccggcagcctggtcaatttgacgtctaaggaatttgatctgctgcttttatttcttcatcataaaggacaccccttttccagggaagatatcctgctgaaaatatggggccatgattatttcggcactgaccgggtggtcgatgatcttgtgcggaggctgcggaaaaaaatgcccgggttaaaggttgaaaccatttacggattcggctacaggatgatgacgtcatgaaaaataagccgcttgcttttcaaatatgggtggtcatctcaggcatcctcttagccatttcgattctgcttctcgtgctgttctcaaatacgctgcgtaattttttcacggatgaaacgtatacgaccattgaaaatgaacagcatgtactgacggagtaccggctgcccggatcgatcgagcggggatattacagcgaggatgcgaccgcgccgacgactttccgatccgttcagcacgttcttctgccgcaacgggaggaatcggccagtgacaaagacttgaactacttttcttcttcctttatccataaggtgtacaagctcgcgggccgccagcacagcgtcacgaaacgatacagcgcggacatcagcggtgaaaaagtatttttcgtcattaaaaaaggcctcaccattaacggccaggatgcgatgatgctgtcttatgcccttgattcttatcgtgatgatttggcattcaccctgttcaagcagctgctctttatcattgccggcgtgattttgttaagctggattccggcgatttggcttgccaaatatctctcgcgcccgctcgtttccttagaaaagcatgtcaaacggatttcaaaacaggattgggatgatccggtcatcgtcgacagaaaagacgaaatcggaaaattaggccagaccattgaagacatgcggagcaagctggtgcaaaaagacgaaacggaaagaacgctactgcaaaatatctctcatgatttaaaaacgcctgtcatggtgataaggggctatactcaatcaataaaggacgggatttttcctaagggggatctggaaaccacaattgatgtcattgaaggcgaagcagaaaaacttgagaagaaaattaaggatttattatatttaacgaagcttgattatttaatgaagcagcgggtgcaccatgagacatttgacattgtgaaggtcacggaagaagtcattgaacggctcaaatgggcccggaaggaattatcgtggaccgttgaaacagaagatgcattaatgatgcccggtgatccggaacaatggagcaaacttcttgaaaacattctcgaaaatcaaatccgctatgcagaaacggcgattcacattcggatcagccaaaatcagcagcagattgtcatgacggttaaaaatgacgggcctccgattgaggatgagatgctatccagcttgtacgagccttttaataaagggaagaaaggcgagttcggcataggactcagcatcgtaaaacggattttaaccttgcataaagcatcaatttcaattgaaaatgaccaatcgggtgtaatctaccgaattatcataccaaagtagactgtagtgtttcattgcagtcttttttatgtgaaggaatagccgttaaaatctctgtagtttgctttcagcggtttttggcattgatgaacccatttcttttcacaaattgtctttttcggatatttcaccttttcgactttaattcctctgtttcgcaagcggctgatcatttcatctaattctttcattttcagattcaccctttcgccagaactttgaccattcggtcagctcactttataatataaataaaacaaaacaaaaaaacaagttacaatcaggttaaatttacggaatatcaatatgaccatatagtcatacatgagaagcacaagccagcctcctggctccgaaagggtggaaccattgaaggaaaaagaaaagctgatcattgaagcagcaatcaaactgtttgcccgaaaagggtacaaatctacatcggttcaggaaatcgccgatgaatgcaaaatctcaaaaggcgctttttatctttactttccttccaaagaagcactgcttctatccatgctgaattactactatgataaaacgtttacccgaatcacgacgatccaaacggagggtgacagtccgagagccgcttaccaaaaacagcttgcggtgttttacgaatcgatcctcgcccatcaggattttattaccgtgcagatgaaagacggttcacttccttataccgaagaagcggcgcagtgcggaaagagaatccgccggtcgatcctgcagtttcatatcgacagtcttcttgcgatttacggagaaaaagctgaaccatacacagccgagctttgttttttaatagaaggaatcagtcagatgtatcttgaatatctcattctgaccggccggtccgtacagccttcgcttttggcaaataccgtgattcacagaattgatgacatcgtaaacggaatggctgacagacatgatgaagcgtttatttctcttgatgaggcaagctcactgtttgggccccttcataacgggcagcccgatcctttaagccaatcgatcttgcagaccctccgcacgcgcatcggcacgatggacaaggcgcaagcatctgaattcaccgagagcttggatattctggaagcggaaatgaagaaaaagtcgccgaaaccggcaatcatcaaaggaatgatactgaatttgaaggaatccgacctgctggctgaagatgcagaacagctcagatttttactgaaacagcagtttatttagaagaacggccgcaatgactgcagccgttctttctttttatgctttcgggtgcaccatatcttccggacgcaccatttcattaaattgttcttctgtcagaaggttcagctgtaatgccgcttctttcagcgtcaggccttctttgtgggcaagcttggcgattttcgcggcgttttcataaccgatgtgcgggttaagcgccgtaacaagcattaatgagttagagagattttcctgaatcgtctcttggttcggctcaatgccgacagcgcatttgtcatggaaggaattcattccgtcactgagcagctgcacggtctgcaggaagttatagataataaccggtttgaagacattcagctcgaagtttccttggctggccgcaaatccgattgtcgcgtcatttcccatcacttgagcggcgatcattgtcagcgcctcactttgcgtcgggttgactttgcccggcatgatagagcttcccggctcattttcaggaatgacgatttcgccgattccgcagcgcgggccgctagccagccatctgacatcgttggcaatcttcatcaggtcggcagccaatgcttttaacgcgccgtgaacgtgagtgatttcatcatggcttgtgagcgcgtggaatttgttaggcgaactcttgaatgtctgccccgttacttttgtgatttcttccgcgacgaattcaccgaactgcgggtgagcgttgattcccgtgccgactgccgtgcctccgatggcaagcgcgcggattttttccgttgactcaagaatcatttctttcgaacggtcaagcatgtatacccagccgctgatttcctgtccgagcgtcagcggagtggcgtcctgcaaatgcgtgcgtccgattttcacaataccctgataagctttcgctttttcatcaagcgtcgcgcgcagctgatcaagcgccggaacgagctgctcatatacggcaagaaccgccgcaacgtgcatcgccgtcgggaatgtatcgtttgagctttggctgcggttgacgtcatcattcggatgaatcttcagctcggaatttttttctttcagtaaagcagtcgcgcggttggccaccacttcattcatgttcatgttgctttgcgtgccgcttcccgtctgccagacaacgagcggaaagttatcatcgtatttgccgtttaaaacatcgtcacatacagcggcaatcgcctgtgctttttcagactctaagttgccgaggcgttcgttggcgatcgctgtgcttcttttcaatattgcaaacgccttcacaacacgctgaggcattttttctgaaccgattttgaagttctctttgctgcgctgtgtctgagcgccccaaaatttatctgccggaactttaacttctcccatggtgtctttttcaattctgtagtccatttatgtatccctccataacagttgcttcaccctgagtattattcgccagtaacagatgaaaccctttttatttttcggccttggccgtttttaatttcagctcaagatagacgcgcgaatccttagagtatttatacttcggatttgttttacggtattctttcgacgtgtaagccacttcgtaatgcgcttcaaatgatttgatgagctgttcaatttcttcggcatttcctgccagtctgacttgtgccacatctctcctccgctttcataaaaaaacttgtaccattaaatactttatcatagtatatcatttttttaacaggaaaagataacctcaattaaggattggaaggcgggtgactgtcgatggcgcaatcggaattcaaggaatacatacacgttaatctggcactggtgcttccccacgtagagcagaatgatgatctggttcaaaataaaaagatgcttccgaacgggcttgttttttattatatgtatctgagtgaaatgaacgacgaagacaaaataaaagaggcgattgaaatgctgcttcgggaggaagacactctgacgctggatacggtgacgaaacgtcttgataagatcgacgcccgtcccgtctttacgtcgaaggaagccgtcatctccattctgcggggaaaatgcgccgtgtttattaacggacttgacagcgtatacattttgtccacgggaaaaagagaaaaaagaagcgtgaatgaacccacatccgaaaaggtcgtaagaggtccgaaaatcgccttcatagaagattctgatacaaacgtcgccatgatcaggcagcgcacgaaccatccgaagctgaaaacgaaaaaggttccgatcggagaaaataagttaaaatacgccacggtcatgtacatagatgataaggcggacccatctgtcgtcagcgatgttgtaaagcgcctcagcgaagtgaagatggacgacatccaggattccgggacgcttgaggagcttattgaggataataagtattcgccctttccgcaaatacaaaatacggaacggcctgataaagtctcttccgccttgttcaacggccgcgtcgccatccttgtcgacaactcgccgtttgcgctggtggttccggcttctttaggaattttaatgcagtctcccgatgattattatgaacggtggatttccgcctcgctcatccgggtgctgcggtttacgtctatttttattacgctgtttttttcgtccatttatatcgccctcgtttcgtttcaccaagggctgctgccgacatcgcttgcagtcaccatcgcggcgaacagagaaaacgttcccttcccgcctatcattgaagcgatggtaatggaaattacgatagagctgctgagagaagcgggcttgaggcttcccagcccgctcggccagacgatcggattggtgggcggagtcgtcatcggccaggcggccgttgaagcgaatattgtcagttccatcatggtcatcgtggtcagcattgtcgcgcttgcttcatttacggtgccgcagtacgggatgggtctgtcattccgtgtgctccgtttcatttcgatgtttaccgccgcagctttcgggctgtacggcatgattttatttatgctggcgatctacactcatttatcgagacagcgaagcttcggttctccgtatttctcgccgaatggatttttcagcttaaaaaacgcaaacgactctattctccgtctccctattaaaaatcaaccaaaagaggcgaaaaacgtaaatgagccagaaaacaactctcaataagcttacaagctatcaagggacggcattgatttccaacacgatgctcggggcgggactccttaccatgccgcggtcgctgtcatcaagggcgaattcgccggacggctggattgcattatgtctggaaggcgtcatctttatctttttgatttatctcaatacgctcattatgaaaaagcatcagtacggatcattgtttgattatatgaacgaaggcctcggcaaatgggcgggaaatatcgtcaatcttatgatctgtctctattttataggagtcgccagcttcgaagcccgggcgatggcggaaatggtcaagttctttttattggagagaacgcccgtgccggttacgctgtttatctttatcgcctgttccgtttatttaattatcggcggcatgagcgatctcggcaggctctttcctttctatttaacgattacgatcattattttgctggtggtgttttctttcagctttaaaatatttgatctggacaacctgcggccggtgctcggacaggggttttctcccgttatggcttccttgaccgtcgtttctgtttcattcttaggaattgagattatgctgtttctccctgagcacatcaaaaataaaaagcacacgttccgtatgtcggccatgggctttggcatcccgattattttatacatcattacctacgtgctcgtcgtcggcgccttaaccacccaggatgtcaaaacaatgatctggcctacgattgcgctttttcaatcatttgaaatcaaagggctttttatcgaaagattcgagtcttttttgcttgccgtctggattatccaatttttcgccacctatgtatcgtacggatatttcgcgacatcgggtcttaataaaattttcgggctgaagcacaaaaagggcatcattttcgtaggcattgcgacattcttcggatcattgatgcccaaagacgctaacaagctgatgctgttcagtgatattctaggctatatcttcttggttttctttttgctgcctttactgatgtttgcagtcgtcgctgtgaaaaggaaggtgaaaaaagcgcaatgaagaaatatatcgtaatcattctttgcacattgcttttagccggatgctgggacagccgcaatatagaagatttgagtctcgttatcggcgtcgggctcgataaacccgaggaagaaaacgtggaagtgacgcagcagattctggttccgcaaaaagcaagttcccagcagtcgtcgtcagggagcgacacgacaaaggtgacttccacttccggagaaaccgtccatcaagccttacgaacggcatcattaaaaaatcaccccgctttctcccagcacttgcgtatcatgctgttttccgaggcgctgttaaaggacgacatcccgcttgacgcattgatgaaccaatttatcagggacaacggtacgagaagaagctgcaatgtgatgacggtgccggataaaacgaaagatattttcaaaatcagtgaccagggagagcctgcgtcaaatacgatctatgacttaacggagaataatgcggtcaccatccggatgatggagcccgtgacattgggggaaatatccgagagaatcgccaagggcgagacctttgcccttcctcaagttcgccaagtgggcagcagactggaaatctggggcgctaccattattaaaaataaattctggtatgcgaatctaactcctttacaagtccagaatatgaacctgttcacaggcacggtaaagggaggcgttacgtttgcaaagcatgacaattattatttgtctttcgaggtattttccagcaaatatgatgtaaaaacacaatataaaaacggaaaattcaagtttatcgttacccggtttgttgaaggccgtctatctgaggattggaacccgaaagaagattccttcaaggagtcctatataaatgaaatcaaaaacgcggtaaaacgcagcattcattcagatgtcatggcattcattgattacatgcagcatgagttgaaagtggatattaccgggttaggcgatcaagtccggattcattatcccgataaatggaaaaagatatcctctgactgggatcatcacttcagtgaatcggatattgaatacaaagtcaaagtcgccatcagggatttcggaacaaagggaatgtcccaatgaccccgttcctcgggagagtgtgctggcaccgctctccttttcttatgtcacgagatgattgcggtgggcatatacggctgcctgcgtgcggtcactgacatcaagctttgacaatatattcgtaatgtgggttttcaccgttttaatcgtaatgaacagctcttcaccaatctctttattcgtcttgccttccgctacgagacagaggatttccagttctctttttgtcagcgtttcatgcggaagctgattctctgaatggcgcagccttgacagcacttttcccgccaccttcgattcaagcttcggttcgcccttggcagccgctctgatggcttcggctatttctgccgccttggacgttttcagcaaatagctgagcgctcccgcttcgatcaccggatacactttgtcgtcatcaataaagctcgtcagcacgatgattttcgggtcattgagtttcgcgcagatctgttttgtcgcttcgataccgtccatgccgtccatgacgaggtccattaaaatcacatccggcaaaagcgctgcggccagatcgacgccctgctgcccgtctgatgcttcaccggcgacttcaatgtccggctgtgcttctaaaaatgcggccagacccatcctgaccatttcatgatcatcaatcagtaacactcgaatcactgtcgttctctccttttgttttctgataaatcgggactttcacgtcgatctgcgtgccttttccctttacggagataatttccgctatgccgccgatttcactcgctctttccttgatggaatgcaggccgtatgaggatgctttgacttgatccatcgtaaaacccgccccgttatcaatgactttaagctgaagtttttgatgtttcgcgccgagcctgacggtgaccttggtcgcctttgaatgtctgaaaacgttggaaagcgcctcctgcacgatgcggaacagatggtcttcaacgccttttgacacacccgtatcgctgatgtcccactcaatatccagcggctgcttcgctttgaactcttttaacagctcaatcagcccttcttttaagccttttccttctaaagtgacgggccgcaaatgcaatagcagcgctctcatctcgttttgcgcttcccccgccatatgttcaaccatgcgaatccgtttgacgattttgtcatccgcatctttcacctgctctaagacggcggatgtcatcatagaaatggcaaagagctgctggctgacggcatcgtgcagatcgcgcgccagccgctggcgttcttcagtgatgaccgattttttcatttgatcctgccattccgcacgttcgttggagagcttttgcagcgatgtgacctggagctcgacccgcttggccatttcgttgagctgatctgccgccagaccgatttcatcatcgccgagcggcggcacccgataagcaaaattgccgttttcaaatttcaaaaccgcttcaatcagtgtatccatccttgttttcaggcggccgccgtatacataaccggaaatcaatcccgccgaaagagacgccagaagcaggatcaccacaaacggaataccgaaccagccggaagaaaacaacagcattgggtcaagcccgtaatacagcagcatcagcgtaataaacaccgcgcaaaggagcagactgagtcccgcggtcatccgcatggcgcgccactgaatattggcgagtaattttttcctcataaatacttcacatccacatcgccgatgaataacgaaattgaaattttaatccgccgcggcgagtcgccgtactcagacgatactttatacagattcgggctcatgccgcttttcttagagccgagcaggttcatttcgccgataaaagccgatgaactgacggacacttcgatatccggcgggacgtacacatcgacattgccgatgacaccgctgatggtcatcgtgctttctccttcgggaatcatcgcttttgacaaatcaattttcacatcgccgatgaatccggaaacatttaaatcattcagctcaaacgggtccttcatcatccggagctcgccgataaaaaagctgcggaggtccggctgtctgctttccgtctgggcggaaggctttggctgctcttctttttcaagattgattttcttctctttatgttcatgcacgcgctttcctttcaggagcctgtagcccgcgtatatgagaaaggcggcgaaggcatagccgaacaggttaaaggtggcgctgaacaggttcctcaaaaataaaaaagcggcgaagatatacaggacggagccaagccagccgcgggaatatttattaaaaatataacctgtgatcagaaaaaagagcggccaaaacaagaagtcgccgatgccgataatacgcaaaaacatgctgacgcctaataaggcgatgataagtccgagaatctgtttttttgccatcagctgcttgcccctcctttccttgactattgcagtgcaatattgccgctcgtcacttttatatcaatcggcctggcgccgctgcctttcatgccggtaaatgccccgccttccttactcgttttctcaaaggaataagacggctgaatccttccgcttgccgtctcggcgttcaccgtaaaacttccgtctttcggcagggtgatcgctgcgctgccgctcgcaagcctgacggatatgggagcatccgccgtctcaagcgaggcgtcgacactgccggaagcgacccgcacgtcaagggcgcccgccacatgttgaagcccgacacgtccggaggaaaagcggacagcccccgtttttgccgcaaggcctgctgctgtgagattgcccgacagccccttcgcttcaaacacatccgtcttcacgtgcttcagcgacatattcccgcttacagaacggacgccgaggtgcgcaagagacagccccttgtttccgtcgacggcaatgctgccgcttgatgtatggacggtgatgtcccgatgataatcatacggaatgcggacaatcagcagagggcgctgaaagagattcagaaattggaaccctttctccttcgctttaagattgagggtctttcccctgctttggacaaacattttccccgccggtcccgtcatgtttgccgcgatatcattccgcgcttccgcgatgatttttacatccgtctgttccgatgaaaccgacaggctgttgacggcacgcggcggtatgcttgccgattccgcttctgtttcgtacagcggaaaaaaacgcccggcaaacacttctttcaccaaaaacagacagcagatcagaacggacgccgccatcagtcctttggcaatcttacgcttcattacgttccatcctttttcattcattttattataaaggaaaagccggataattgatacgtgcgtatagggaagaggcgtaaacgcgccgatcttcccttgtgcacattattcatgagccgctttttgacgctctgttttttccagagaaagcgagcgcattttttcaatctcagcttccacctcgtctgaatattgggagcggctgtattctgtgttcgcctcagctgaagtgccgtatttgacgcggacttccatttcttcaatgcggctttccattcgaaggaactctctgtaggcgctttcgctgtcaattttgtcgaaagaagcgttcatatgttccttcgcatttgccgcgttcgcgcgggcgatgagcgcctgttttttatcctttacgtcgcggaggcgcgtttctaaagtttccagctgctctttcagctctgccagctgtgttttcgcctgctcatacgctttttcatgttcagccgcttttccctcaaggtatttcatttcagtcagcgcctttttcgccagctcctcttccccggcgtcaaaagcaagctgagcttggtttttccgttttgccgccgtttcggaggcgtcttcctgttttttcttaaactgatggacgatcgtatgctgtttgacaatcgtttgtttcgccttagcgatgtcactttccatatcacgcacatattgattcagcatgactttcggattttctaatttatcaagcccttcgttaacagatgcgacgaacatatttcttattctttttaagaccattttgtcttcctccttattttttcttcagaaattcttcccattcagagtcaaatccggattgatagcccggtgatgccgcttccggttcatactggcgggaagcggtatctgagccgccctgcttcatcatcttccacccgaaatacaccatggcgccggccagtccgatcgcaacgataaatggaagagaaccgacgagaattatagctccgatgacgcccgcgatgatacccgataccgcccggccttttgaaaaacgtttgattccccagtaaagcatcaggcctccgatcgccagcgggatgataaatgcgaaatggcctcctccgaaaaagacagaaagtccgaacacaatcagcagaaagccgcctgccgttttgccatttatattcatgcagatcctcctttcgttttccttgtctttactataaacaaatcccgcggccggcaaaacgagtcagagattgattttcatatcagaccggagtcgtataagcccccggaccttcgcataaaaaaacgccgctgcaccggacggcacagggcgtttcacgaaaaatctatattctgatgctcgcttctttttccctgatgagatctgagcgttcggctttggccagcttcgtaaagaacaatattccgagaccggacaggacttcaacgagaccgccggcggcaatgacttttccgggaccgaaggcgttagccgcgtatccgcaaagaaccgcgccgagcggaatggatatgtttgagatcatatggatgacggcatagacttgcggctggtcatcatggtccacagacgtctgaataatcgtatattccggcacattaatcgcgctgacggcagatccgaacgcaaacgcggcgaggaagacgagcggcagaaaagtgttgaggccggtgatgaaaaatgccgctccttctatgattcccgctgacacaaacaggagaccgtatttgttcaccttcaccttagccaaaataaaacccattaaaaaggctccgcccgtgcctgtcgctttcaaaagcgagtagatgatcggcggcatgtttaaatcttcggcgacataaacggcagagagcgcctcccacggagcggccgcaaaattcatgaagatacaatagatggcgagcgggtataaaatctggtgtttcctgacaagaacgaaaccccgtttgagccttccgaaatacgtcccgcgctgtctgacggcgactgtatcctgtttggcatgctggacttggtatgacataaagagtacgagaaaacctgatagaagatagaatataagagcgataaacaaagaataagcgggactgataaatgttaagaacaccccgctcagcgtaatggcggcaagcctgacgatctggcctgatgactggatgaccgcattcgctttctgcaggctgttttctctgacaatattggggatcaatgagatagatgcaggattataagcggctcccgtggctgaatgcacaatcatgagaagcatgacaaaccataaaggagaaaaaccgttaaagtaacagaccggaatgatcaacacgaccgccgcgcgcgtcaggtcggagaaatacatccagaatttcagcgtatgctgcttcataaaaggcccggtaatcggcgccagcatcgcctccggaaggaacgtgaccgcaatgagcagggacgtgccgatcgcgccttccccgtcaaaaatcaaaaaccacagaatggaattaaaggcaaaaccgtcgcctgacaatttaaccagccttgagataaacagaagggtgaaatttttattccagatgctctcgctcttattatatgtatccatctatcaaatcccccattattttacaatgtttcttataatatctcattttttaatttttcagtcaataatgcataagatacattttcctcctgtcaataaaggttcaattgatggatatctctataaaaaaaacagccggcttgctgctgccggctgaacaaaacattattcatcatcacggaataccgcggcgcttctttcatactctatatcctgaacgccctgtcttgcgttaactgctcttgccgccgcgaaaaaataatcagacaggcggttcaagtaacgcatcaccgtatcatttatctcttctgttttgccgagtttcacgatgagacgctcagcccgtctcgtgacggtccgcgcgatgtgaagctgagcagccgccttatgcccgcccggaagaataaatttctcaagcgggggcgcttcagccgtgtaacggtctatgcagtcctccaatgcggaaatagatgtctctcttaatgtatagcttctatgttcagtgaccgtcgccaagtcgccgccgcagtcaaacagctcatgctgaatgtttcggagttcggctttcacatcaccgcaattctcacaatcatcaagctccgcaagcgcaagcccgataaagctgttcagctcatcaatcgtcccgtagctttcaacccgcagactgtctttatccgttctgccgccgatcaggcttgtctgtcctttatcaccggttttcgtatacagcttcatcgttgtattcctccttcttccgccgcttttacacatgccgcggttcctcttctgacggctctttccgcgtgagggacatccatcgcctctcctgtctgcaaggcgcaaatgacaatgtcgccttttgcctgtctgccggaaagagcctgcattctcgcttcagccgctgccgttaacagccgtacaaatccctgttccgataaacgtccgctgatcagcacccaaacggtatgctgcgcagtcacggcaattgtgaccgaatcaaacgtacggcagatcaaaccagcggccgctgagccggaaagccggcggctccacgaaaagcccgggccgtcagatgcggttgacaacattctgaacggccgttctgtatgaagcgttacggtatttccgcttttgtttatcagagaggcgaacggaacgttgacaggctctctttcctcctgcgcttccggcatgaaagcgatcagcggtttcggtgacgattgctgggcaacagcgctgacggtgatgccgtaaatgtcttcaatcgtctcttttttcaaagcctgatccggcgtctgcttcggaaaagcgcgtccgtctttcatcatcaggagctgatcacaatattggcctgcggcgtttaggtcgtgaaaaatactgatgaccgtcaggcctctttctctcgtcaaccgcttcaccgtatcaagcaggtctttctgatatttgagatcaagaaaggtcgtcggctcatccagacacagcacctcaggctgctgagccagcgcctgcgccagaaagacgcgctgccgctccccgccgctcagattgcggacggattgctgcgcatatcggtcgatgcccgtcatttccatcgcttcccggacaatgtcttcgtcatcatgttgatccatctgtctgaagagtcctttttgatacgtgtatctgccgaaggacactgtttccttaacggtaaatgtaaaagcttgctccgtatgctgcggcaaaacggccatgattttcgcaagttcccgcggcttgtatccgccgatgggcctgcctgctacgagcacctcgccttttgacggagagagcattcccgtcagcaatttcaacagcgttgtttttcccgagccgttcggaccgagtatgccgacaaattcaccttttccggcggtaaagctgacatcttccacaatcatccggcctccgtacccgccggacaggctgctcaccctgatcataagcgtttccctccatgatgctggcgaagcagaatcaaggcaaacacaggcgctcccgccaaagccgtcataatgccgatcggcaattcgacaggctcaatgacggtgcgggaaaacaaatccgccaaaatgagaaaaccggcgcccgtcaatgctgacagcggcagtaaatggcgatgatccgttccccataaaagccgtgtcacgtggggaatgacaaggccgacaaatccgatcgtccccgagacggcaaccgctcctcccgtcagcagagatccggcggcgatcatcagccattttctttttcccgtactgacgcctaacagccttgccttttcttctccataagtcataatgtttaattctctgccattgataagcagaagcgccgtcccggccagaaaaaaaggcagaaacagcgcgacatagccccagcccctcattgacacgcttcctaacagccagcggacaatcgggagcagatcattgcccgttaaagcgatcacaagcgatatgagagccccgagaaaagaattcatgatgatgcctgtcaaaatgagcgtcgaaaccgacatcgacgcatgaacgaggcggctgaaaaacagaaccgccgccatgaccgcaatcgctgcggcgatgctgacaaccggtagtgtgaaccggccgatgacgggaatctgaatgccgaaaaacaaggtgataacggctcccgccgaggctcccgaagataccccgagtgtataagggtcggcgagcggatttttcagaagtccctgaaacgccgctcccgcaatggataacgcggctccgacaagggcagccagaacgactctcggcaggcggatattcatcataatatttacattcatagggtcagccgaggatgtccggccgatcccgatccaaaaaacgtcggataaaggaatatgcagactgccgattgaaatgccgagtgccgtacaaacggctaaaaacagcaggctgaccgtgtaggccagcgggcggttactttttaaacgtttcaggataaacgctttctgcaagcttctcgacccctttgacaaggcgcgggcctgagcgtgtgacaaggtcgggatcaacagaatagacattgtggtgtttgaccgcattgacggcaccccagccggcgcgtttttccacttcagcggcctttacgccgtctgtcgtaatgatgacgtccggattcattttgacaatcgcttcatccgtcagctgaacccagccggtctggctgccggcggcgtttttcgcgtgtatatcttcaagcatttcgttcataaacgtgcctttccccgtcgtgtagccgtcaggagacacttcgacgaatactttcttttcgtctttttcagaaatggccgccgctttcttttctatgccggaaaggtcggatttcatcgatttgatcagcttatccgcctgcttttctttgccggccgcttttccgatcatgctgattgatttgtacacatcttggaacgattgcgcatcattgaccgttaagacggtgatgcccgcatctttcagctgcttcatcgcatcggcggaagcggacatagaggacgcgtgggcaagcacgagatccggcttcagcgcgatgactttttcagcgttcacattcatatctccgactttcggtttttttaccgcttctttcggatatgtatcatttgttgtgacgcctgcgaccttatctcccagtccgagcgcgtatgtaatttccgtattgctcggcatgagggaaacgattttttccggtgcctgctttaaggttactttttcgttcgcggcatccttaatggttaccgggaatgcttcggttgagacggctttttgtttggccgcgcttccttcttcctgtgcgccggaacagccggcgaccacaaaggcggtgaccaagagcgccgcccagacggcagtgatcttcttcattcttttaactccccctgattatggtaaacgattgtctctttgacattcgtatccttttttcgcagtaattatactataagtctttaaggcttgtatatccggcctttttgcatgaaagcaaattgttcgtacacactaaaattcatcatgtatactgttacacaatggtgtaaaaaggaggattatcatggaattacagcttgaacgaaagctcgttttgattacaggatcaacctcaggcatcggaaaagccgcggcaaaaagctttttagccgaaggcgccgaggtgattataaacggaagaaaaaaagaaactgtggaacggacggttgaggagctttccgcttacggaacggtccacggcatcgctgcggatttatcgcgtcaggatgaggcggatgacttgataaagcgcgcaggtgtaatcggggaagtcgatattctcgtcaataatctcggtttttttgaagtaaaagacttcgctgaggtgtctgatgacgaatggactcggtattttgaagtgaatgttatgagcgccgtgcgcctgtgccggcgttttctgccgcaaatgctcgagagaaacagcggacggattctgaacatctccagtgaagccggtgtcaaaccgcttgcgcaaatgattccgtattcaatgacgaaaacggcgttaatcagcttgtcccggggaatggcggaaatgacgaaaggcacaaatgtcacggtcaactccgtgctgccgggaccgacatggaccgaaggcgtcgcttcttacatggaaggagccgcaaaggctgccggagaagacacagacagcttcgtccgggattattttaaagtgaatgaaccgacatcattgattcagcgctatgcaaccccggaagaagtcgccaatacgattgtatttctcgcttcatcagcggcttctgccattaatggcaccgcacagcgggttgaaggcggcatcatccgctccatttaacacaaaaaagcccggcacaatgggaacttccccatatgccagggcttttttttacatcatgcctgcaaacggaaccggctcccagccgcccgtctcaagctctgctgaaaacaggccgcccgcatgcggctgctcaagtctttcggcttccgtcaatttttccgtcgcggtcgtaatgtataacgtgttcaagtctctgcctccgaacgcgcagcaggtgacgtatttcgccggaacttcgatagatgcaatttccttatgcaaaaacgggtcaatccggacggcacggccgcctccgaacagagccacccacagcattccgtcacggtcaatggtcattccgtcgggagatccttgcgacttcggaaagcggtagaccgttttcggatctgatacggctccggtttcaggatcatatgaataacagacgatttcctgcgtcggagtatcgatatagtacatcaggtttcggtcccgatcccaatccaaaccgttcgaggtggagacctggtcttttattttggcaaggctgccgtccgtattcagacggtacagcgaagcctcctcttctttgccttccatgctcgtcgttcccgcccataatctgccggacggatcgcattttgcgtcattgaaacggatatcttcccgcatgtctttcggctgcttcatcttcgtcaatgtgtcttcccgaagattgtacaggtaaaaaccgtctttcatcgtcatcaccagctcttcctttgaatacaaggccagagccgtgacaaatgatttgaatttaacggaacggttgattccgtcagccggattgaagatatggagctggctgcccagtatatccacccagtacaggcattgcttgtccttgtcccataaagggccttctccgataactgctctcgtatctgctcgtaatgctgcttccatgtgtgaacacctcttttgcttgtcagtcttctattgttattcccgacaaagcggcgtccaaactcaatcttttttaaaaagaatcgtaatcaccgttccggcgctgattctgctgttgacatggatggttccgttatgaaggtgaaccagctccttggcaatggcgagcccgagtcccgttccttctgacggtcccttcgtattcgttccccggtaataacggttaaacagctggtgaatcgtttcgtcgtccattcctcttccgttatctttcaccttcagaatgagctgttcggctgattcctcaagcacgacccgaatggcggtccctttcttattatgcttaaccgcgtttgccagcagattctccagaatacggcggaaccacgcttcatcaatggcgaaaagaatgtcttcctttttggtttcaaaggcgatgtcatagccttccgagaacgtgtttttcgtgaaatcgttcgtgacgtttctgataaacggcacgacgttgatcagccgccgttcgatcgggagggccgcgtttttgaggcggtatgttaagtttaagtcctcaatcagcttcgacatatattctgatttttcccggacgatctgccccatttctttgacttcttccggggtccagtcgtattgcttcgattcaagcatcatgctgtagccgtaaatcgtgctcagcggggtttttaagtcatggctcagcccggcgatccactcttcccttgtcgcctggattttttctctgtttttcttatcccgcttcagcgtgtcggtcagctgatccatcgattcgaaaatctcggcgaaaaagcggaacggctgttttgttttgccttttttgtttttgctgaccggctgtcctttgcggttcttcggctcttcaagccggccctttgataaattgacgagccatttgatggtatgaaacagcggccagccgaaacggaaagagtaccagatggtcaggatgcagatcataaataccaggattccgatcaagaggaagagggttttcatcacatttctcaaaaatgatttgttaaactcgtgatcggggatgtacacggggttcggcaccgacgcgaccatccatttcgttttatcgagtcttttaaaagaaatttcccgtttgtaattccacggcttggaactgtatttcagcaattcaagctcattgacggtgttccgttcttttttcgtgctgttgatatccccgagcagtctgccgctgtcttcgagaaggtagaccgcccctttttcccgtttaatataatcaatcgtgctctttttatattgagaaagggaagcgagggatggctcctgtgattcgatgtaagtgagaagctgctcactggcggatttccagccgaacagaatcaaataggtctcatcatttatcgtgaccgtccagtaattcagcttgtagttgtcaaaattccggtactggtaaatggataagagatcttttctgctgtaatggctcgggacgtctttcggcactctgtacgcgtagtccgttttttcattgtcattaatgatctgcagccagcccttctgctttcggaccgacatctttaaaaactcatcgacatcccatgtgccgtcttcgtttttatcaagccacgcttcaaacgagtccgcggtcgctttggtcagtcccgcattggcttccgcttcgctgaaacgccaatccaaatagaagaaagaagcgacggccaaaacggacatcagcaggatgacaagcagaagctgtccgaaaaagtggagcagaaattttccgcgcattctcatgagcgggttcctttttctccttgatcgggaataaaccgataaccgaggccgcgcaccgttacaatataggacggattgctggggtctttttcaattttttctctgagcttgcggatatgcaccatgacggtgttgttgtcgccgtaagacggatatccccatactttttcatagatctgatcttttgagagcaccacatcagggtgttcacaaaaatattgaagcagctgcagaagctgtgcggagcagctgacgggctcgcccccgacgatcagctcggcgttttgtggtgaataggaaaaatggctgtatgaatacgtctttaccgccgttttctcttcgcgcttataggttctctttaacgtcgctctgatccgcgccgccaattcgagcggattaaacggctttgttatataatcgtcagctcccaatgcaaatcctgacagcttatccgcatcagaagaacgggcagtcagaaaaaagatcggagcgtcggtatagttccggatttcggtgcatgcttcaaaaccggacatgccttccatcatcacatccagcacgagcagatccgcggtttcatgtttaacaaactcgatcgcttcctcagcgcttccggctgtcttaatgttgtgatagccttctttgacgagaacgcgtttgaccatatcaacgatcgccttctcatcgtctacaattaaaattgacgcattttccaccttggacgttcctttctctttgtttttttcatcatatcattatatggataagatttggtacttttttagtgcggaggtcttgcggggaaacagaaaagaaaaacgagaccggacatctcttctcgtttttctcacgttgtcagagcggaatatccatcattccgccgctttttgtcaggagctttcatttataagatgaagaataaattcccaaaaacccggcacttcctggcataacagcatgtccgctttttcaactattttaatcttcaattcttgttcaagatcttctctttcctggtatgatgtattgctcagttttttttttatcattggcgaaaaacgcgaaatcaaaagttccatttcgtcggtatgtgtgttctctttgttgaagtcaaatggcccgttcactgcttattttccccctttttttgcttgtccagctgctttctgagattgtcgagcccttttttatgaatattggaaatgttctgccgtgattcacccagcgactcggcaatctccttcatcgtcgctccgtgaagataaatattcgtcagcacgcttttttgtttatcggttaacgtctgaagcgcttcgtataaatcacggttttggacatgctggctcaaatccccctgcttccgcagaaactcttcatacgcgtcttttcccatttcatagggaagcgattcacctccctccggctgatccaccgtcagcggatagcgcttctgatttttacggatgcgcttgtcaaaatcgatggagaaaatccggatcatagagttcatatatttgatgatccggatttccttataaaactgtttaaaatggtcgtccagtgattttgcatccttctcgtctgaatgttccagcacatttttaaatttctcgtaatgctttgggtcacttaaaaaatgtttaacgatcggatgtttcataatttccttgcattttgaccgtaaaagaacttgatagtccataaaaccgccccctatttaaattaaatgaaagaaagcaaaaaaaagtaaactactcctttccgactaagattccgcactccttatgtcccggatttgccggaacaaaaaaaagaccctcaaccgggatatcaggtttacaggagccgctctttctttcacttatatacatgactgcaggtcaagtcaggaggtggctgataatggatcaggtttttatagaagaagcggtcagacagctcggcaatctcggctttccggctctgattgccatgtatcttctcacacggtttgagaagaagtttgacgccctgatcgaactgatgacggaactgaaagatcagaaaatgaaaaattaattttcacacgaagttgacttttcatcggaacgcatcacttaacaaagcagaagggaaaacgaaaggcctttcacattctctttctgaaaaaacaaagcttgagaggagacgatttacatgtcaaaagaaaacaactgcaatatcccgcagccgatcagaggagacaaaggggcgaccgtcacgattccgcgcaaccttgaaagagaccgccaaaatccggatatgctgacgccgccggaaacggatcacggcacagtggataatatgaaattctctttctcagatgtgcacaaccggctggaaaagggcggatacgcgcgtgaggtgaccgttcgcgagctgccgatttctgagaatctggcatctgtcaacatgcgtttaaaaccgggcgccatccgtgagctgcactggcataaagaagcggaatgggcatatatgctgacgggcaaagcgcgggtcacgattgttgatgaacagggacgcagttttatcgatgacgtgaaggaaggagatctgtggtacttcccgtcaggcctgccgcactccattcaggcgctgaaagaaggctgtgaattcctcttggtttttgatgacggttctttctcagaaaacagcacattccaagtgactgactggcttgcccacacaccgcttgatgtcatcgccaacaacttcggggtttcagaaaaagacctcgccggcctgcccgggaaagaaaaatatatctttgaagagccggttcccgggaagctgaaagatgacattgtggaaggcccgaacggtgaagtgccttatccgttcacttaccgcctgctggatgaaggtccgactgctgagacggatggcggcaaagtatatatcgcggattccacaaacttcaaagtgtccaaaacgatcgcttcagcgcttgtcgtggtcgaaccgggcgcaatgagagagctgcactggcatccgaacacgcatgaatggcagtattatatttccggtaaaggacggatgacggtttttgcatcggacggccatgcgagaacatttaactatcaggccggggatgtcggttacgtcccgttcgcaatgggccactatgtggagaatttgggagatgagccgctcgtcttcctggaaatcttcaaggatgaccactatgccgatgtgtccctgaaccaatggcttgccatgcttcctgagaaattcgtccagcagcatctggatctgggcaaagactttacggatattctttcgaaagagaaacaccctgtcgtcaaaaagaaatgctgaagatacacaccggcttgcagagttccgtctctgcaagtctcctctgtgtgaaaaggagctgaacagatgatcaatcaaaacgggacgaaaatgttttttcttcatgtgcttcggtatgccctggcagccgctgccgtattattcgggtatttcatcgtgatgatggccgtattttcattagccgggacgagctacggatcgatggcgtacgtcctgcttttttccgtgctttttatttttctcggtttatgttttgaaccgcttgagcggctgatgatacatagctttaccttttttgggacgggcaggctgccttttctccttttagccagcaccgttcagctgctgttcctctggatgactgcgtatacgacggataaactgattgaaaagatttggctgtcaacgacggaggagctgattgtggcgggggtttttttcgttttggataaaggcgtctccggacaaaagcagccccgggcgcaataaaaaaacgcaggccggaatggaactgaccccataatatgagacaaacaaaaaacaccttcaagtttgaaaacggaccgttgttatccgaaataaaacttggaggtgtttttctatggggacaagagtgagttatccggttgaagtcaaacagaaggctgtaggaatgagattggcgggcgtgcctatgaaagagatcatgcaggaattgaatatcaaaaataagactcaggttcagacatgggttagatggcataaggctggggatacccaccgattcgaacagcctgttggaaagcaatacacttacggaaaaggttcggagtattcttccgatttagagaaactgcaggcagagattcgttacctgagacaacagaatgaagtgttaaaaaagtacaacgaattggaaaggaagttgatagcgaaacgtcagtcgaacttgtagaaatattgcacagcacaatgaccgtacaggatatctgtattcatttaggtatctctcgagcgtcttattatcgttggaagaagaatctgatgaaggatcatcccaagcgccatttggaaaaacaaatcggcacgttgtgccgagagcacaagtatcgatatggatatcgaaaaatcacagccatactaaaaaagataatgtgtattaaccataaaacggttcaacgtattatgcaaaaaaatcaatggcagtgtcgggttaaggtgaaaaagcgcaagaaggatgggcagccatatgccgtggtcgataatatattggatcggaactttcagtctgatcgtcctcttgaaaaactagtaacggacatcacatatttgccttatggacagaaacaattgtacctttccagtatattagatttatacaatggagaagtgattgcttttacgattggggataagcaggacacagcctttgtcttagacacacttgatcagctaccaatgctgcctgagaactgcgtgttacatagtgaccaaggttctgtgtatacatcttacgagtatcaaaaagctgttaaaacaaaaggcattaccatgagcatgtcccgcaaagggacgcccgctgataatgcctccatcgaatcgtttcattcctcgctaaagtctgaaacgttctatcttaacagcattgatcgaactacgaccgccatcgtagaacgcactgccatagaatacattcattattataacaatattcgtattcaaacgaaactaaacagccaatcgccgatacaatatcggcaattggctgtatgaaggtgttttgatccctgtctcaaaaacgggggtcagtcccgaatggctctgcgtttttttttcatcataccgttgcgttttcatgccggattaaatcgtaggttaagcagaccggtttgttcgtgcgcggatcttttacaatctgtgcgtcaatttggaaaacgtcttccaatatgccgggagtcatgacttcctccgccgttccttccttgatgacgcgcccttttttcagggcgatcatgtaatgggaaaaacgggcggcatggttcagatcatgaatgaccattaaaatggtgcggccctgctccttgtttaatttgtccagcagctgcaaaatttcaagctgatgggcgagatctaaataagtggtcggttcatcaagaagcagcagctccgtttcttgagcgagcgccatggcgatccacacacgctgccgctgccccccggaaagcgcttcgatcggccggtcgtaaaattcggccatccccgtctcttcaagcgcccatttgatcatgtcacggtctttatcactcaaacggcccattccggactgatgcggaaacctgccgtaagaaacaagttcgtacaccgtcagcccgctcggcgcttcaggcgtctgcggaagaattgccatttccttggcgatgtccttcgtggatttttgcatgatcgcctgtccgtttaaatagacggcgccggatttcggtttcatgattcttgacatcgttttgagaaccgtcgattttccgcagccgttcggaccgatcagcgttgtaatttttcctttcgggatggcgatatccaattctttcgctatcaaacggtcgccataaccgacagtaagctgttccgccgataatgagttcatcgcggcagtctccttcctctatttcgttttcatcagcaaatatacaaaatacggcgctccgagcacggaaatcaccaggccgacgggaacttcggacggtgcaagcacatttctcgccagcgtatcggcaagcagaaataaaaatgcgccgattaaagccgaaaccgggataagcgtctggtggcgcggtccggtaagccttctggccaaatgcggcgcaatgagtccgagaaaagcgattccgccggctgccgcaacacatgacgcggtcagggcaacggcgcacatcagcagaacgcgccgctccttttcaacccgggtgccaagccccgccgccagctgatcaccgagctggagcacatttaaatacctggctttatagaggctgaacggtaaaagaaccagcagccacggcaaaatggacagtaccattttccaattggcgttccaaatcgaaccggaaatccatacaagcgcctgcatgaaatcccgcgggtccattttcagctgaaaaatcaagagaagcgcattaaaccccgcattgacgccgatcccgaccaaaacgagccggacaggtgaaacgccttttttccaagccagcacatagatgagcagcgcagccagaaaagcccccgctaaagcgctcaccggaagcagccatgtaccggccatgcttaaatcagcagctgatccttggaaaaagaagataaacaaaacgaccgccaaagacgccccggcgttaatcccgagaatgcccggctccgccaagtcattttgagacacgctttgaaaaatcgcgcctgaaaccgcgattccggcgccgaccagcaatgacagcaccatgcgcggcagtctgaattcaaataaaacgagctgatcccgggcatccccttgtccgaaaaagacacgcagcgtatcaagaggcgcaatccggatcacgcccatgtttaagctgataaaaaagacgatgcatatgagcaaaaacgtaacggccatgaccgccagcggttttttcgattttacattcattacagccctctcctttccctgcgcgccaaataaaagaaaaagggaacgccgataacggcggttaaagcgccgaccggtgtttcaaacggcgcattgacgagtcttgcggcaatatcactgaagactaacagaacggcgccgaataccgccgaacagggaatgatccacctgtaatctaccccgactaaaaatcgggtgatatgcggaatcaccaagccgataaaagaaatggctccggcgactgagactgaagcccccgtcaagaggacaacgacaaacattccgattactttcacaagcgatgtgtactgcccgagccctttggccagctcctcacccaagctcagcaccgtcactgagcgcgcaatcagaaatgccagcaaaagtccgataaccccgaccgccaacagcagctgcacgccttcccatttcacggaagcaactcctccggcataccagaacttcacatcctgggcgacatcaaaacggatcgcaatcgcgcttgaaagccccgttaagaaatagccgactgccgtaccggccagcgcgagcttcaccggtgtcagaccgccttttgaaaacaggccgatgccaaacacaataagcgctccgattcccgctcccgcgaaggaccacaaaacaagtcccgccgcagacaggcccggaaaaaaagcaaacgccaatgcgatcgcaaatcctgaccccgacgtcacgcccataatggaaggctcagcaagcgggttccgcgtcagcccctgcataatcgccccggacacagctaaaaaagccccgacgagcgcggcggcggcagttctcggcagcctcagatcgcgtatgatttgatgagatgtattttgcggctgaaagtgaaagagagcatcccacaccgtccgcagatgaatatcggcagctccgatggaaacagacagagccgcgccgatcaataaaaccgcaatcccggcacacagcagcacagccgcccggaatgaacgcgccgtccactggatttcactccctgatgccccttgagccgtcattgtctgtttctttttcaatagacccaacactcgttcttcctttctcaaaacaagaatgttaatgataatgattatcaatgacttgtttcagtatagcacttttatcttctcttttaatagacctaatttcatataaaaaaagaaagtttttcttaaaaaagagcgtgcttctctatgaaagcagtgatataatcacactgataatgattctctttatcactaatttttatgaaagaaggaatgtcaaatgttccatacatacaaaaaaatcggcgcagcgctgattgccatgctgctcatcgccgctttggccgcatgcggcaattcttcagacacgaaaggttcttctgaaaaagaagaaaccatcacgtataaagccgaaaacggcaatattaaaattccgaagcacccgaaacgggtcgtcgtcatggctgacggctactacggcgactttaaacagctcggcatcaatgttgtcggcgcgccgcaaaacgtatttaaaaacccttattacaaagggaaaacaaaaggagtgacaaacatcggcgacggcacgtccgttgaaaaaatcattgacttaaagccggatttaatcgtggtctggacgacacaaggcgccgatattgaaaaactggaaaaaatcgcgccgaccatcgccattaaatatgacaagctcagcaacattgatcaattcaaagagtttgcgaaaatgacaggcactgaagataaagcagacaaatggctggctgaatgggataagaaaaccgctgccgctaaaacaaaggttcaaaaagcggtcggctcaaaaaccatctccatcatgcagacaaacggaaaagacatctatgtattcggtaaagacttcggccgcggcggaagcatcatttatgacaaactcgggctgaaggccacaaaactgacgcaggaaaaagccattaatcaagggccgggctacgccagcatttcactcgagaaactgcctgacttcgcgggagactacatctttatggggccatggcaggccggcggtgacgacaaaggcgtgcttgacagctcaatctggaagaacctcgatgccgtcaaacaaaaccatgtctaccgcattgatccgatcggcttctatttctcagacccgatctcacttgaaggccagcttgactacatcacaaaaagcttaacgaagtaaccccgaagccgctgtcacagcggctttttattacgctttacacttgaccgttttttcagcggacgcactgaccatttaaccgcattcgagaccattcattatatacatgccgtcaaaaagtaatcagctgccgcaaacaaaaaaaagacatctcacagacgtgagatgtctttttgtcataccgattgtctgttgtttgcaaatttctttgaaacgaaaggatataacagcaaaccgacgaaaaacagcccgataccgagaataaaggtcgttaaatcggccgttccggtaataatgacataaaaagaataaatgcaggcaaggatggcgatgataccgtctcttactcttgaaccctttatctcgtcatacgtttcacccgtaaaaatgagcttcaggctgtaaaacgctgacacgagatacggaatcagataagcgagcgtcgccgccgtcgttaaaaacgtaaacgcgtcactgatcgtccgggaaataactgaaaagataaagatctgtgacatcacgttcgttacgattaacgacacaaccgggctgccctgtttattcgtttttgcaaaagcagcgggaaagtctcctgatttcgccgcttgatacggaacttcagagccgagaagaatccagccgagcatcgttccgaacagacacaaaatcgccagaatcgccatgatgacgcttcccgcattgccgacgatcgcgtacaatacgtcaacaaacggtttttccgagccgacaagcttaccatgcggaagcacgcccatcgtaatcaatgtcacgatgatatagatgccaagcgcgatcaataatccggtaatggtggcgcgtttcacgtcacgctgcgaacgggcgcgcccggataaaatgactgccgattcaattccgacgaacgcccataatgttgaaatcgccgcattgtggatctgtccgccgattccctcaactgtgtgaggacctgtttgaaccggaaaataaaaatgatcgaaaaacgacgtttgaaacacaaataaacctgcaatgataaagaagataaatcctaatacttttgaaaacgtcgtgacgaaatttaatttactcgcaccgttaatgctggtgacgagaatcgtgtgagtgccccataataaaaccgtacatacggcaaacgtcagcagctggccgagcgtaaccgcctgaccgccgatcgaaaacatttcacgcttatccgttaaaatcgggaaaaatgatgttaaatatccggcaaggctcgtgatgatcgccacgttgctgatccagctcgccacccaatagccccacaccatcgtgaagcccgctgcattcccttttttccgatcgctgaacagcgcacgcgcatagctttgcggccccgccgtcagctcaggcttgcggatggataagtggccgaagaccagcgcgatcattaacacaccggctcccgttaaaagccatgccgatgtggcgccgaacgggctcgcgatttttgcgagcgaactcggaagcgaaaagatgcccgagcctaccatatttcctacgacaaacgccgttaataaccaaaaaccccattttttcgtctgttccattcctgtacctcctggttgttcattcgtacggaccagaccccgagaccatatttacacgcaaaaaaagcctgaacaaaagtccatgcttaaagaaacacacacacccttgatctccggatagccctccgcgaaaaagcacgcggcagtcctgcacttattcagatacagtcccagcataaagaaggatcggctttctttacacttcggcgctgatgcctttaacacatgttttgcggccccctatcagcctggcatgtgcgactcatcatcaagcgcaacctctacctcaccgagaaagagtgaggatttttatcattcaattctactcagaggttatcagagataaaaagatctgtcaaagggaaaaattagatggaaaacggatagagcgttcgccctacccgtcttatatggtcagcggttgttttttttcttttgaacagcttcttgaagcggatcgtctttcagagctgcaccggcgtcttcaagcgcgccttgaatgacgtttttgtttttatcgctgttttttcctttttctttgttaaagaaagccatctgtatcacctctttatcaaatataggtacacctataatgtgtctttttccgcggcagaatatgcggaatccgcgtctccttccttttggcggaacaggtaaagtttgttgatcaaacatgcattctcttgatatatttgtaattcaggggattttggcaaaaataaaaaggagaagcgaaaaatgacaggaaaaacacacatcatgggaggcatcgcttcttgttccgcaattgcgtattattacgggtatgatccggtccttatgacctcagcgggtgccctcggggcgctgattcccgacatatgccatacgaaaagcaaaatcggcagaacgctgcccgttctgtccaaaatcgtaagcacggtgttcggccacagaacgtttacacacagcctgctgtttatgcttattatgtttttcattacggcaacctatattccgaatccgagcatttccgccggactgatgatcggaatggcgagtcatcttgtgcttgacgcatggaccgtcaacggcattaaactgctgtttccgtccgccatccgcttccgtcttcccctttatatgagaacggggagtttttcggagcagcttgtgctggccggcttaacgattgtatcctgctattatttatacgaactggttcacggccgcatctcttaaacaaaaagcatctttcgcttttagggtgaggagtcatacatatgaagaaaacctttttcagcaatcatcggtttttatgcctgtccatcctgttcatgtggatgaaaacctatgccgtttataagctcggttttgatctgcagaacaattcggttcttgaggaatgtctgcttctcattaatccgctgagcttcattgtgccgctgttcggcatcgccctgctgctgacggaaaaaaaacagcggatctttctgctttcggcaaatgtgatgctgacgggaattttaatcgcgaatacggtgttttacgggttttatattgattttatcaccataccggttttgtttcaggcgagcaatatgggtgatatgggaagcagcgtccaagagctgtttcacccgctttatatcgctttatttttggatattgcggttttgttttatcttggtaaaaggcataaagctggtaaaggaaaagcgggcgcccgtaccgttaaagcgtatgcgtgggcatcagccggcctcatgctgtgcaaccttgcgctgtctgaggccgagcagccgaagctgttcaagcacccttttgatcgtgaagcgctcgtaaaaggaatcggcctgttccactttcatttgtatgacaccatttcgcagacgctgaatgcaggagctaaagcgtttgccgacgaagacagccttgctgcggtcgcgaattacactcaagccgactacagcaggccgtccgaatcaaagttcgggctcgcaaaggggcgcaatgtgatttttgttacgctcgaatcaacacagcgttttgtaatggatgagcgggtcaacgggcgggagattaccccgtttttaaataaactgcgaaaaaaaagttatgacttcactcatttttatcagcagactgaacagggaaaaacctcagattcagaattcattactgcgaattcgctgtatccgtcttcaagcggcgccgtttttttcacaaaaagcggccaccggttcaatacgatgtaccatatgttaaaagaccgtcaatactattcagccgttctgcatgccaatcataaggccttttggaaccgggatgagatgtacggggcattcggaatcgaccgttttttcgacgcggatgaatttaaggtgacacaggaaaattcaacaggctggggcctgaaggataaggaatttctcgaacagtcagcggaaaaattaaagaagcttccgcagccgttttacgcgagcctgctgactttgaccaaccattttccttttgaaattgataaacaggatcagctcattgaagaaccggacacaagcagcgagttattaaaccgctatgtgacgacggtccgctatgaagatgaggccctgaaacactttttcaagaagctgaaaaaagaaggactgtatgacaacgcgatgatcgttctgatgggagatcattacggtatatccgaagcccataatcaaggacttgccgaattcttagggaaagaggaaatcactccgtttgatacggttcagcttcagcgcgtgccgtttatcattcatattcccggggtgaccgaccgtgcgccggaaacgattgcttcggccgcgggacaggttgatgtaagaccgacgctgcttcacctgctcggcattgaaacgaaaggcagcattcagttcggcaatgatctgttttccggagagcggaccccgtttgcggtgctgagaaacggcagctttatcacggatgatcatatttatacgaaaaatacgtgttacagccgtaaaacgggtgaaccgctttctgacatgagcgcgtgcagcgatgagaaagaaaaagcggaacaagagctgatgctttccgataaaatattaaacggcgacctgctgcggttttataagcaataaaaaaatccctccgttatatggagggatttttcatgtttcatatatgagccgtccggtcattttcgtatcatatccggataattgagaaagctgagacttgaattcctcagaattgagaatgtcctgcacgctttgaacaagctcccggttttgttttaagacgaccacatcgtactgctcactgatcaccgggataaagtccgtgcccgccatatgcgccgcatgctgcgacccgactccgatatccgcctttccgcttgatacttgtgaagccgctgacagatgatccgtgacaatgtcatgatagccggcgacatcagacggcgtaatgccgaaagatctgagctgttcatccagcagcaccctcgcgcctgatcctttttcgcgattgacgatacggacatcctttcggctcaaatcctgaaagccctgaatgttcagcggatttccctttttcacatataatccggcttgccgcagcacgacatgaaaaagcgcaaacggctcccctgaaagaatgcgcttcacatacgggatgttatactgccccgtctccccatcgtacaaatgcagactgacgatgtcacaagctccgcggtacatctcgatcaggctgttcaaactgccgctgtacttgcggagcggagccgcctgtattgtttgttccagctgtttgctgaggaggtccatcgacacatcctgcccgctgatgataacggactgccttttttccggctcccgcccgcgggacgggtcaggcgcttctgctgcggatggcttttttgacattctcatgtttgctttatattgttttaagtcctcttcatcgaccctcatctgtcttccgaccctgtacgccggaatgagtcctttttttatcaaatcatatactgtcagtttggagaccttcaaaaggcccgcaacttcttctattgtataggaagtggcttctgtcatattatcacgctccgtttttattataactgttcagatattgaaaaaaaaccgcaccatcacgtacaattgcgttataattagtttgatctaatgatatttagctataaggggtgcacaatgttgaaaaagaaagcgacactactcacaactgcggctatggccgttttcctggcaactgcgggctgctcatccggacaatcgtccaaaggcggacaaaacgaaaaagtcacgctgaccgtttctgcggcagccagcgctcaggatgcacttgaagaaatccagaccaactacgaaaaatcacattcaaacgtaaccattcaagacaacttcggatcatcaggcacattgcaaaaacaaatttcacaaggcgcgggagctgatttattcttctcggcagccgaagataaattcgaaaagctcgttcatgacggagatatcgacaaaaaggacagcacggatcttttgaaaaatgatctcgtcatgatcgtgcctgagaaaaacagcgcacacctgacacatctgaatgacctgaaaaaagacagcgcggaaaaaatcgcgctcggcacgcctgaatccgttccggccggacaatacgccaaacagtcattgacggcattatccctgtgggacaaggtaaaagataaagtcgtctatgcaaaagacgttcgccaggtgctttcttatgttgaaaccggaaatgtcgatgccgggcttgtctataaaacagacgcgctgatttcgaaaaaggtgaaaatcaccgatgaagcgccggcgaaaacgcacgatccgatcgtttatccgctcggcatcgtcaaggatacaaagcaccgtaaagaagcagaagcgttttatcagtatctgcagtcagatgaagcaatgaaagtgtttaagaaatatggatttactgccaagtaacattacggcttgggaatttttcaccccagtcgtattgtcttttgaggtggctttggcatcaggcatcgccgtcatcattctcgggacgcttgccggcgcctggatggcgaaagcgcgatttcccggaaaaacggctgtggagaccctgtttatgctcccgctcgttcttccgcctaccgttgtcggcttcattctcattattattttcgggaaacacagctttatcggccgggcgattgagcggatttttcaccagcccgtcattttcacgtggtcggccgcggtgatcgcttcggccattgttgccttcccgcttatgtatcagtccgctaaaacgggcttcgccgcggttgatgccgacattgagggagcggcgaaagtagacggagccggcaggtggcaggtgttcacccgtatttccgtcccgcttgcctttccctccctcttgaccggaagcattctcagtattgcaagggcgctaggtgaattcggggcgactttaatgtttgcgggaaatattcccggcgtcacccaaacgctgccgacagcgatttacgtcgcgatggactccggcaatgaaacactcgcctgggtgtgggtgatctgtattgtgatcatttctttcctgatgctgtttttcatccaattgaaaaaacccgcttgaccgatccgccttccgcgcacctttcgccgggaggctttttgatttaaaatcggatggtatataatgaaacaaaaaacacacaaagggtgcggccatgaagattaatgtcattatcgcggatgataattctttcatcagagaaggaatgaaaatcattttgcatacatatgaggaatttactgtatcggcaacgttggaaaacggcctggaggcggcagagtattgtaaacacaatcccgtcgatatcgccttgctggacgtccgcatgccggtgatgaacggtgtcgaagccgcaaaacgaatcgcggaggaaacggatacgaagccgatgatcctgacgacatttgacgacgatgagtatattttagaagcgattaaaaacggcgcgaaaggatatttattaaaaaataccgaaccggaacggatacgcgatgcgatcaaaagcgttttcaacggacacagcattcttcaggacaccgtgctggataaaataaaagacagccttttccggccggcggaagccgcgcatcagattgatgaaagccagtttactgaaagagagctcagcatcatgtcgcttattgcgaaaggactgtcgaacagggaaatttcaaaacagcttttcatttctgaagggacgacggccaattatatttcatctattttagggaaaacagggcttgagcatagaacgcagatcgcgatttattatatcaccgggaaggtggataacgggcgttgaacggtatggatttttggatgctgatgagcagactgatcgccattttttatacggcttttttgttcgtatcggcagaccgcccttacacgccgtacgccgtcttgtttctgctcgcttatctgtctttgggcattgcggtctgcatgatcaggccgcccgcttggaggcgcgggatcaccctcatgacgctggcattgactgcttggctttccgccttaggccatccggcgtttctatttcttttgccgcccgccatttttgccgttcttgccgaatatccggttcaccgctatgtgttctgcctgctcgtgtttttgccgtttttatttatcccgtacggcgaccttccgacttatatcgtcatgaccttgttctgcttggcgatattcgttttggccgcccggtccagcgaccggctgaaaaaatatgaagagcagtcagacaatatgcgctcaagcattgaaaaactgacgaaacagctgcacagcagcacagaatatatcaaacaatcggagtataccggcaaactcgaagaaagaaacagattgtcccaagccatccatgacaaaatcggccattccatgacaggcgcgctcattcagatggaagcggcgaagcggatgctcggctcccatccggacaaagcggctgaactgctccaaaacgccattaccatttccaaagagggcattgaggatatccgcataacgctgaaaaatatgaaaccgcccgctgaacaaatgggcattcacagattaagaacgtttattgatgaattttcggccaaaaacgggatgccggttccgtttacgtatcaaggcgatttggacaggctgacgcaaatgcattggagagtcattcaggaaaacgtaaccgaagccttgaccaatgcaatgaaatacgccgatgccacacagatcttcattgatatccatgtgctgaacaaagccgtgaaagcggaagtgaaagataacggaaacggcgccgtccgctttaaaaaaggcctcggcatgctcggtatggaagaacgggcggccgtcttgcacggaaccgttatttttgacggcacggccggtttttccgtcacgacattgcttccggttgaataagtgaatgttttcatgtgaaaaatatgaagattctcatgtcaaaggaatgaacagctgcactaacggccgttcattcttttttttataataagagcatcataagacatagaggtgaaacatgaacattttggagctcaaacagctgagtaagaaattcggtgattatgccgccgttgaccagatgtcgcttgccgtaaaagaaggtgagattttcgggtttctcggcgcaaacggagccggaaaaagcacgacgatcaatatgatctcaggccttttaaaaccttcaggcggagacattctgtttctcggaaaagatattttcaaatatagcaaagcaacgaaaatgaatatcggcatcgtccctcaggacctcgcgatttacgaagaattaaacgcctatgaaaatgtgaagttcttcgccgggctgtacggcctgagaggggcggctctgaaagaacgggtcgaggaggccctgacattcgtcggcttgagcgataaacacaaatatttgccgaagcatttttcaggcggaatgaagcgccggctcaatatcgcctgcgcccttgcccaccggccgaaactgatcatcatggatgaaccgacggtcggcattgacccgcaatcaagaaattatattctgcaatcagtgaaaaagctgaatgaaatgggctgcacgatcatctacacgagccactacatggaggaagtggaagaaatatgcacacgcatcgccatcatcgaccacggaaaggtcatcgcagaaggcacaaaagaacagctgacctccatcattaccgacacgaaggacgtcgtgattgagctgtcatccggaaacggcatcagcctcggcgatattcaggagctgcccggcgtcagagccgccacactggaagaaaacagcgtgaaaatcagctctgacacaggggtcaacaatttaaaccgcctgatccggtacttcatggacaaaggaattgaaatccgctccttgcaggaacaggcccctgacttagaaacggtatttctcacgctgacaggcagaagcctgcgcgactgacctcactgaaaggaggattgcaaatgaatattctgcacatcgccgggaaagaaatcaaaatcagtttccgcgacagacggacttttattttcatgcttgcttttccgatcgtcttcatgctgattttcactgcggcattatcaaacgcctttgattcagaggtgacggtcgggaacatcgaggtcgtatatacggaccagtcaaacggccctctttctcatgattttactgagtttatgaaagccgccaaaaaagagcatgtctattttcaaaaagcggacacggaggcaaaaggcaaaaacgaggttcgagaaaatcaggcggatgctttcgtcactgtaaaaaacaccggttttcaagtctttacaaatgaccggagcggcataaacggcacgatcgtccaaggcatgctgaccgcttttaccaatcaatacaaagcaggcgccgccgcttacaaggcgcataaggcgccttccgccggacaaatcaaaagcgattatatgaagcagacgtctttacacaaagcgaaagaaccgaaagcgaaagatttttacgcgatatccatgacgacgatgatcgggctgtacgcctcgatttttgcaagcaccttattccgcggggaaagaatacggcacaccgcagatcgcctgatcgccgccccgctccggaaaagcgatatctttctcggaaagatgctcggcattttggctgtgaatgttctgacgattcttgccgttgtcgccttcagcaaatttatcttaaaagcgaattggggcagccacatgggacttgtgcttttgattctcgtttctgaaattcttttggccgtcagcttcgggctcagcctgagctatttgaccagaaaacccgaaagcgccagattaatcaccgtcatcatcgttcaggtgatgtccattatcggcggcgcctattacaaatatgaaggcggaggaatttccgccctgtcgcccttatcctggatcaataaggcgattaacaacatcatttacgcaaatgatgtatcagcggcatggcctgcactcggtttaaatacagcattggcggcactctttttgctgatcgccgcatttacgtttcaaagacgggagggactgtaatatgaaaaacttctggtggctgtttgcgcacactctcaaagggattacaaaaagcaaaaaacagctcattctttatatcggggctccgctgatcggcgtcttcctctccttcatgaccaatgccaacggcggagccgaaacgctcaatatcggcattctcgatcaagacggcggagaagtggcgcaggatacggccgcgtttttaaaaggactggatcatgtgaagatttcggaggaaacggctgcgtccgccacatcaaaaatcgcttcaggaaaaatggaggcgctcattacgtttgaaaaaggcttctcccaaagcgtaaaagacgggaaaccgtctcacatcggcatgacctcgctgaaaggcgcccaggtcaccggatatgtcagctcttatttgtacaattatatgaacagcatcgcctcaatcggcaaatcctccggcggagacgcaaaggcctttcaggcgatgtacgccgatttcaagcattctcccattcaaacggagtccgctgttttacaagatacatcgaaccataaagaaatgacctactcagtcatcgggtatctcattatcattatgctctattccgccggcaacctgacggaactgatgattaaagagagagaaaacaggacatactacaggcttctgtcaacgccgatcacatcaaagcagtatgtattggcgaacgcggcggtgaatatcattatcatggccgtccaaattctattcgccgttctctttatgggcgccgcttttcatattcatccgtcattcccgctgtggcagctgttcgtcctgatgatgctgtttgcattaagcgcgatcggggtcgcctttattgccgtcggtttttccaccagcagcgcttcggcatcggcgcttttgaatttgatcgtcgtgccgacatgcttgctggccggctgcttctttccgggcaatattatgccgaaaacggtgcagacaatcgccgaatttctgcctcagcgctgggtgctcgatacggtggatcaattgcagcaaggccgcacgttccaaagcctgatgctgaacatcatcattttgggagccttcgccgccgccctgttattaatagccgcatacaggttcagcgtaaaacgtcagacacagacatttatgtaaagaaaaacagccccgtaaagggctgttttttcttagaacagaagctcgtccggattcgggccgacacgctcgtctttgttcaatgcgctgatcttttccatttcttcctgtgacagttcgaaatcaaaaatatcggcattttctatgatgcggtgctctttaatcgatttcggaatggtaacgacttcgttttgaagatcccagcgcaaaatcacttgagcaaccgatttgttatgtttttccgcaatttgtgacagcacttcgttatcgagaagctgtccctgcatcaatggagaccatgcttccacttgaatgccctgcgctttgcagaaatctcttacttctttttgagtcaggcgcgggtggaattcaatctggttgaccatcggcttgatttcagcatctttcagcagttcttctaaatgatgcacttggaagttgctgacgccgatggcgcggattttgccgtctttgtacagcttttcaagagcgcgccatgtgtctttatatttatccttgcccggccagtgaatcaggtaaaggtcgaggtaatcgaggccgaggcgctcaaggcttttctcaaacgcgtcaagtgtcgtttcgtatccttgatcttcattccacacttttgacgtgatgaacagctcttctctggcaacgcccgcagctctgatgccttcgccgacaccctcttcatttttgtaaatagccgccgtatcaatgctgcggtagccgtttctgattgccgcttcaacggagtccgccgctacgcttccgttttccaccttgaagacgccaaggccgaaccacggcatttcaacgccattatgaagctttacagtatcttttaagctttttgccacgttgaaccatcctttctagtcattatgtaaacggttattattatctcacatttccgccgtaagaaaccaattatacgctcatcgttatcacaaaaaccatctttagtgcccaagcaccacttccgttattattttcctatttttcaaaaattccggttaaccggttaactgtccgggtaaatcgctactgtagccaccacacaattgaaggaggaaatcatatgaaacgtatgcgtatcccgatatccgttgcccttggcgccgctttgtctctgactcctctgtcctttgtatccgcaaaagaaaccccggtccctcaaaacatggcacagcaatcatcagatgtctcagcaaaagatgtcggattaaacattgacgttgacctgctcggcatcggcaattcgattgctgacgcgattaagtcggcgcaaaaccgtgacggcttcgtcaaaaacttaatggaatcttcattctacgcttccggacaaaaatataacgtcatggtgtttaatttaagccaggaatatgaagatcattttaacggtgttcagttttacggttccgccgtttatgacggcatcacgtacggcatttgggtgtttgaagacggaagcttcaccaataaaggtgatggcggctggatcaactgggccttcagaggctggtttgaccgcgacggcgatcacgtcgaattccatcgtccgtaatcaaaaaaagtccggcgacagatgccggacttttttgatttattcatctccgtcaagcatggccgcttccacatcattgatgtattggcgaagctcatgtgacatatcgcgggaaatttcccgctcttcgaacaatgtttggatttcgttgcggatggcctgcacggcccgcagtttgatttcgagtttttgattttcaaaacggcggctcggactctgttcgtgatacgagtgccccagcctgaaaatcaagtgattgtaaaaggaaatgacggcaagcgtcacatctttattttcttcagtcatgtgttttttcaggctttcaatggccgcttttgccgttttaacccttgtggcgcggatgaggccttcttcatttaaaatcgtcatttccggctttttttgttcaccgaaaaagatccagtacatcaggcgtttcagctttttcttagataagccgactttaaacggattcgtatacagcacttccagttcatcaaaccgttcctgaaggctgtcagccgtttcttccggtatgtcgccccgctcaatcagccgcagcaattcttcctgttcagcctgtatcccttgggcgcggactttccgctcatcttttttcgtgcggtttttgacggtgaactgctgaaacctgagatttttcattttctcattgtattcggcaatgaccgcaaaagaagccgttttgtttgtctcattcatattttctttaatggccgttaaggcagcttttatcagcttccgtctcgctgtcagcaatttgactttcttctctttcacattgtcttccggcttatctgtcaaaatcggcagtacgattgtcgccagcaccaatgtgcacataataacacccgcggctaaaaagagaatcaaattccgttcaggaaacggtgagccgtcagagagcacgtaaggaatggaaaaggaacccgcaagcgtgaccgctcccctgacgcctgaaaccgaaatcagcagggtcgagcgcaggccgggtttataaatgctctgatccttgttaaaaaaccacttgccgttccaaaaaaacagcacccacaaaaacctgagaatcattaacgtcagcgtaatgacgataatgtacccgatgaccatcatattgttaaacgcggtatcattaaagatgacggaaaccacatccggtatttgcgcccctaaaataacgaaaacaagaccgttcagaatgaacaaaataatattccacgtacttgaagagacgatttgcaatttgaccatcgttgattcaagacggtcctgctccaccgcatgcgtgatgccgccggccacaacagctaaaatgccggaaacgccgatttcttcagccgcgagatagatgacgaacggcgtcagaatttgaatcagcatatgcatcgtgacatcctgcatgccgaggcggcgcaaaaacagccggaaacggataatcaaaaaagaaatgacgacaccgctgagtaaaccgccggctgaaatcagaacgaaactgaaggcggcctgcgccagcgaaaatgcgcccgtcacggcagccgcaatcgcaaatttaaaagcgaccaggccggatgcgtcattcatcagtccttctccttcaaggagacgcagaatgccttttggcatcttcactcgccctgacagcgcgctgaccgcgacaacgtcagtcggtgacagtatcgccgccagcccgaacgcggcagccagcgggatgctcggaatcatccaatgaatcgtgtaaccgccgacaatcaccgtggcaaacacgagcccgagcgcaagcagcagaatcggcgctcttaaattccaaagttccgcacgcggcgtccgttttccatcgttaaaaagcagcggggcgataaacaaaacaaaaaacaattcagtattcagttcaaaatgaagcccctgcggaaatgacgccgcaatgataccgagcgccacctgaatcaaaggcaccgggataaaggggacaaaccgatttacgatatttgagatcgcgatgatggttaaaagtacgagtacgactaaaaatatgtccaaagcatgacctccttcatctgctgcatcatatcattattgcctgttctctgcccttgccaaaggccggagccgatgatcgggcagattcaatatattttccgtacgcaaccattcttcttttattttacccgtttttatttaaaatttctcataacgtgctcacggcgaactttttttgccttcagctacattttttccggaaaaagaaaaagcctgttttctctgaaaacaggctttttcgcaagctgcgtcatctgtttcatgacgcggtgcagcgtttatgctgcttagtaaaggatagagaacgcaccgtcagtgtgtctctatccttggttttaagtgctcatcttattcgtgaaaattcatgccgtctgtcgtcgctttaatgatgcccgcgcggatgacgaaatcgccgaagtgttcgccttcctcacgctctttcgcgtagcgcgggagaatggtgcgaagctcattcagaatttcctcttcaccgatattttcccggtacattttgctcaaacggctgccgtcaaacgccgctcctaaatacatattatattttccgggcgcctttccgataaatccgatttcgccgagcgcatggcgggcacagccattcgggcacccggtcatacggatggtgatttcttcatcccgcagcccgttttcgtcaacaatgtcttcaatcttatcaatcaatttcggcagataccgctcggcttcggccatggcgagcccgcatgtcggaagcgcgacgcaagccattgaactgcggcggagggcggaatgctgccggccgtctgtcagaccgtattgttcgattaatgcgctgatttgtttctttttctggctcgagacattgccgataatcaggttttgattagaggtgagacggaaatctcccgtatggactttggcgatttcacgtaatcccgtcatcagcttataattctcatagtccgtgacgcggccgccttcgataaacatcgtaaagtgccatttaccttttacacccttcacccatccgtaacggtcgccgttatggtcaaaatgataaggtttcgcttcatccagctgccagccgaggcggttttccagctcggcttttacgttttccagcccgagacggtcaacagtgtacttgaatctggcattctttctgacggaacggtttccgtaatcgcgctgaatcgtaatggttttttccgctacatcatacagctgctccggtttgcagaagccgatgacttttgaaagttgcggataagtggccgtatcgccgtgcgtcattcccataccgccgccgattgccacgttgaatccgataagactgccttcctccacgatggcaatgaagccgagatcttgagaaaagacatcgatatcattggacggaggcacggcgattccgattttgaatttccgcggcaggtacagcggcccgtacatcggttccgtttccgtgtcaggagtgcccgccacacgttcctcatcaagccagatttcatgataggctctcgtgcgcggaagaaggtcatcgctcaatttcttcgaccattcgtatacttccgcatgaatttcagactggtgcggatttgaagcgcacatgacgtttcggttgacatctccgcaggccgcaatggtatcaagcagcgccgcattgattttctgaatcgtttttttcatgttccattttaaaattccgtgcatttggaacgtttcacgcgttgtcagcttcaatgtattgtttccgtatttttgcgccagttcatccataacaagccattgttccggagttgacacgccgcctggcatccggacgcgcagcatgaactgataagccggttcaagcttttgtttttgacgttcattacggagatcgcggtcatcctgcaagtagcttccgtgatgcttcatcagccggttgtcatcgtccgggatgccggctgaaatccggtcgagcatgacttctttcaatgtgccgcgcaaataatcacttttttctttaatttcctcaacatcacttggagggccttccggcgcttttaaaatgttgttcaccatgctgaataagctcctttcaaaccaaaatcaatatacgtcacgctgatagcgttttttctgctgcatgtctgccaggaagctttccgctttttcacggctcatgccgccttcttcctgaatgatatcgagaagcgcctggtgcacgtcatgcgccatatgctgttcatcaccgcagatgtatacggcggctccctgctgcagccattcataaagctctttgctttgttctttcatgcggtgctgcacatatactttttcctccgaatcccgggaaaaagcgacgtccatttttgtgagaacaccgttttgcagccatttttgccattccgtctggtacagaaaatcagtgacaaagtgctgatccccgaaaaacagccatgttttcccttcagctccggtttcttcacgctcctgcataaaggaacggaacggcgcgatgcctgtccccggcccgaccataatgatcggtgtatccgggttttccggcagcttgaagttttggttgtgctgaatgtaaatcggaagcgtatctcccggctggagtctttccgcacacagaatgctgcagacgccttttcgttctctgccgtgcgcgtcatatctgaccgctccgattgtcagatgcacctcttccggattcgcttctaaactgcttgcgatcgaatagagccgggccggcattttacgcaggatggaaagaaagtcttccgctgtcgcttcccacggcccgaaatcccggacgagatcaagcagatcacggccgttgatgtacgctttcagctgctcttcgtttccttcggccagaagttcactcagcttttggtcagccgtaaactgtgcggccttttgcaggaacggttttgttaagacggttatttcaaaatgagaagtaagcgcatctttcagcgggaggcgctctccttgtttattcaccgccacttcctgttttgggtcccatttcagctcattgatcagctcatcaacgagcgccggatcattttccggatagatgccgaggctgtctccgggctgatacgcgaggcccgacccttcaagcgaaagctcgagatggcgtgtttctttattcgaaccgcgtccgttcagattgatgttctcaagaacctccgcccgaaacgggttcgttctggaataaacggattcaccgagagccggcgtttcggcaggcgcttcggctgtttgatttcccgctccttcgttcaaaccgccgatgaccgcgtcaagccattccgaaaacggctcatcataatcaagatcgcaatcaacccgcggcgcaagctgggtgccgccgagctcttgaagacgctcgtcaaactctttgccggtctggcagaaaaattcatacgagctgtccccgagcgccaaaacggagtaacggagcgcttcaagcttcggcgcgcgtctgccgtgaagaaattcatgaaaggccagcgcgttatccggcggatcgccttctccgtgcgtgctcaccacgatcagtaaattgtttacttttttcagattattcggcttaaaatcgttcatcgacgcgacggtgacctggaatccccgttcctcaagcgtctttaccgtctgtttcgcaagaccttccgcatttcccgtttgcgatccgtataatacggtcacttctcttgagactgccgggctttctgcaggaaccggagcagcgggtgcggctgtttcaccggattcggaccgggccgcagccaaataaccgctcagccagattttctgtgattctgtcaaggtcggcagaaggcggttaaggagctctgcctgctcctgattaaacggactgttcatgacctgaagttgcaacgatatccacctcacaaggaattaaacgtaacgtacgttatttctataggaattgtcaaaataatattctaattgaaactttaccgaaagtttgtatgtaagtaaaatatataatcatgatgacaatgattaagattactaatgataaaaagccctttgcacttggcaaagggcttacacgaataagccggcgggcacttcttttataaaaggagagggttctcccggagacagcacggtcagatgatgcatcgcgcgcgtacaggccgtatataacagcttacggtcatgttcgcttttgtactgggcagcagaggcatcagcggcaatgacggcgtcaaactcaatgccttttgccaaataaacgggaatgacgcatacccctttttgaaaaggctggttttctttattgatcaagcggacaccgctctcggcgctgaccgcctgaaacacttttttggcttccgcggccgttttgcagatgacggcgaccgtctcccagcctttttgtctgagctcccggattgtatccgccaattgttcccgccgcgcattttctgtatccgtccgcaaaacacgcggtttttccccgttccggttaaaaggttcaatgtcatcgccgtcagccagcagcgctttcgtaaattcaacaatctgccgcgtcgatctgtaagtccgcttcaggctgacatacttttctgcaccattgcgaaagcagccggcgagggaagaagggcccgtaatggtgtgggcataaatcgactgggtgacatcaccgagcaccgtcatctttgccgccgggaagatgctttgtatatacgtcagctgaaacggggaataatcctgcgcttcatcaatgaagacgtgcttcatttgtgtgttttttctttttccttctaacagatcctgcaaatacagatacggagcggcatcttcatacggaagtgatcgttctgcaaatgcgtttctggtcaaagcgccgatgctctcccaatgatcgggcttttcatcagctccccaatctgaaaacagccagagatacatccgttttatatcgagaaagccgagccgtctgacggcctgcttaatcggtttaaaggctttgccgacaataatggcgccaagcagccgctgttcgcgctgatggtcgtcaaatgcaggttcatcatcatctgccgcctgcttcttgagtgtttgataaacctcagcatagtcttccttatcaagcagctcgctctcctgcaagacccattccttcttacgctcctttttttcgagagcgctgatttccgcgagaagccattccgctgtcagctccgctctgttcggaatcggcagctgctgatcaagcgaataaaaataggcttcaatccgttcttttgaaatcaggatgtctccccggaagctgatctgtttacacatcagacccgagccggaaagcgagccggcgtagcggtcaatcatggactggaaagctgatgacgctttgtaagcaatggctgcaagccttacagaaagtgcgtcctgattttgttcagtcaggcaatattcaagctgctcgtacgggctttcacaatcaaactttcgtccgagccggcggatgatatattcctgaaaggtggcctgctccatattctcttctcccaattccggcaatacggcggaaacataactgttgaacaaaatgttcggggaaaacaatacaatctgacgggcatcaagcaccccgcgaccgcggtacagcaagtaagcggcccgctgaagcgccgcggatgttttcccgcttccggcggctccctgaacaatgagatatttgcttttttcatcccggatgatttcgttctgttctttttggatggttgacacgatgtttttcatatgctgtccggaatgcccactcagcacctcttgcagcatttcgtcaccaatcgtcatatccgtgttaaacatcgctttaagcgtcccgtttttaatgataaactgccgcttcagtgtgatgtctccctctatcgtttcttcgggaacttcatagcgggcttttcccggggaatattgatagtaaagagatgagatgggcgcgcgccaatcataaatgagaaattgctcgttgttttcatccatcaaagaagtcagcccgatataaatccgctcggaagaagactcccctttttccgtaaaatcgacacggccgaagtaaggagaggttttcagcttttggattttttgaagctgccggtattgaagccgatgcgtccgttcacgttctgaaagcatttctgcctgctgtttaatgcttgaaaatgtctcagccgcttcatgggcgtcatccatattcacggtgacatcatcccaaaacgtttttctcagcccgacaatatcctgcttcaatccgcccgatgaggcttcaagatgagtttgtttctgttccagttccttcatgacaaaattgattctttcctgctcttctttccactctttatcacgttttgccatcagcggcacctccgacatcaagctgacaaatccggctttcatcatacaaacatatatgcaacatattattcagcattatggtcaaataccctttttcttatcatatcgggcgtctttttttatcagaagccgttatgcaaaaaaaaccgatttcgtttgtgaaatcggttttttactgatctatatgataggaacgattcggcaggcgccacctgaacacataactgcagatgcggcatgccacaagcacaagaaacagcacatacaaaccggcggcatccccggcccagccgaggcccacgattaaccctccgagcgcggcccagaccgcgtaaatttccgccttgagcacaagcggcttcctgcccgcgagcaaatcccgtatgatgccgcccccgcttccggtcaggaccgctgccgcaattaccgcactgagcggatggcccattttcacggcatataaagcgccttggatggcaaacgccgaaagcccgatggcatcggataggttgccccatttactccaatgccttaacagcagcttcggaaacaaaaagacaatcgtaactgatgcgagagcgatttgaaaaaacgcgccttgctcccacaaggcgaagaccggaacaccgatcagcagatttcggatcgctcctccgccgaacgccgttacaatccccaagatatacacgcctaaaatatcatactcctcttccatcgcaacaatcgctccgctgaccgcaaacgcaatgatgccgattacactaagcagctcccaggccattccatatgctcctttttatttgttaaattttctgacgaccattagattttataatcgctttctcttaaaatcaaccttatttttgaaagattctgattcctaacccgggacaacctcactcgcaacggctgggagcaagaacatttacctattttatactattttgggaggtttattggaagtttcattgaatactttctctaacaaaaagggggttatgagatgaaaatcagttcacttgtttttcctgttttattggccgccggattaattcccggcctgccgtcagccgaaagccatacgcattcgcacactcatgcggagccggcgaaaacggtgtatacggacccgcttccgaaagccgatcattttaaagatctgaagggcccggtccaagtcgaacagacggttgacacaaaaattctggatgaaaacggcaagcaggtcggcacgaaacgattcaatgccaatgtcagtcaggataaagcctcaactaaagccagcacgggctctcagaaggtcagagtgctggcggtggcggacgctgaataccgcgccaaatacagcgactggcaaacgcgaatcgtccagatcgtggagcaggccgatgttgcttttaaccgtgatcacaacattgatttcgtcgtacaggccgtgcaggcttggaattcctccggctcaaacagttctcagattttatcgaatctccaaggcagcttcagaaatcaaaattatcattttgtcgtcggttttaccgcaaaatcaagttttgacgccggcggtatcgcgtatgtatataacggcaaaccgagcggcccggctttcagcgtgaaccttgatcaaggaacggccaacacggcgaaagcggcacagcacgagttttcccataacttcggacttcagcatgacgcccaaggcagcggcatccgctgcgtcatgaattatgattatgcctattccgtggatatttgggacagctcccataacagacagattgagacaaacaaagcttggtacaaataatagaaaaagagccgctcccatggagcaggctctttattttgccgtgcgttccgttttgacaaaacacatgcagataataatgagaataaatgccgtcaatgccaggaaaggaatggtaatgaaaccgaaccagttaatatattcagatgagcaaggcacgccgtagacacacggcttgatgccgctgaaaccgggcaccttctgctcaaggtaatgcatgatcgatataaacgcgccgatgacggccatcggcagcacgtatttttttacgcgcgtgtcaccctggaaggtggcgattcctaaaatcaggacaagcgggtatatgagaattctttgataccagcacagctcgcacggtatgaattttctgatctcgctgaaataaaggctgccgagcatagcagcaagagcaatcacccaagaagcatataaaaatacgattctatttttcatttttcagctctttcttaatcgtttttgaaatctcatcatatttagagaagtcattaatcaccttgtcatttacgtaaatcgtcggtgtcgccgtaatgtttaatttatcattcaggtcagtgtcagctttcagctcttttgcaaatgtctctttatcaaggttttccttcagcttgtcaggatcaacctttttcgcagtgcttttgaccgttttttcaagcaatgcaggcgtgacccattcctgttcgcttgacggctgctgttcaaacagcttttcatggaatgcccagaatgatgccgggtcttctttccacacttcttctgaagcaagagccgccagacgcgagccgcttccgtggtacatgacgttcacaaatgaaaatttcacgtcgcctttatcgataaaatcttttttgattttcggaaagatatcgctgttaaatactttgcatgacggacatttgtaatctccgaattcaactaccgtaacaggcgcgctgtctttgccgagcacgggctgtcctttaatggaaggctgttcggcgactgtttcgcccgctttttccgtttggttgttaataattacgatggccgcaaataaaacgacaacgattaacgtcagtatcaccgcaaatttcgcagacgattgtttctttttcactcagacacctcattgtttttaaaataaaaaagaagcggatgccggatggcccgcttctctattttaccaagacaaccttgtttaagaaaaccctgaaaaacgaattatctttgacaattattccgctttcactctcatgacgcgcatcgcgttggcaacagcgatcagcgtgacgccgacatctgaaaagaccgcttcccacatggtggcgaatccgaatgcgccaagcaggagaaaaatcatttttacgcctaaagcaaatccgatgttctgccagacgatccggcgtgtgcggcgtgcaatccggatggcttcggctgcttttgacggctggtctgtcatcaggacgacatcggccgcttcgacggcggcatcagagccgagagcccccatggcagctccgatgtcagctctggcaagcacaggcgtatcattaatcccatcgccgacaaacatcagtttttcattcggtgcaagcgccgcttcaagttcttcgacgcggtctaccttgtcacccggcaaaagctctgtgtacacatcatcaataccgagctctcggccgacagcttctccggtctgctttgaatcacccgtcagcatcactgtccgcttcacgccgagcgcttttaaattggcaatggcctgtttggcgtcctctttgatttcatcggcgatcacgatcgcccccgcatactgctgatcaacggcgacatagacgacggttccgttgttttcagctgtgccggaagcgatttgttcttttgccatcagtttttgatttccggctaaaatcgttgatccgccggttttcacccgaatgccgtgtccgggtatttcttcatattcttcaatctcctcagccgagagcggttgattgtaagtttcacggatggaagaagcaatcggatgattggaatgggcttctgcaagcgcggccgcatgaagcaggctgtctttcgtaaaccccgccgccggtctgatatcagtaacggcgaaattgcctttcgttaaggttcccgttttatcaaacacggcgtatgccacctgattgagcgcttctaaatagttgcttcctttcacgagcacccctgctttagacgcagctccgataccgccgaaaaacccgagcggaatggagacgacgagtgcgcacggacaagaaatcacaaggaaaatcagcgcgcggtacacccagtcggatagcgcggctgaaggcacgagaagcggcggtaaaaaggcgagaagcaccgcaacaatgacaacggccggtgtataatacttggcaaacttcgtaataaagttttccgttttcgctttgcgtccggccgcattttcgaccagatccaatatttttgacacggcagagtcttcatatcctttagaggtttcaatatgaagcacgccgttctgattcataaatccggccatcacatcttgccccggctccgcttttcttggcacggattcgcccgttaaagcggatgtatcaaccatcgaagaaccgctcagcacctttccgtccaacggaatccgttctccgggattcacgacgatgacctgtccgactttgacgtcctgcgggggaacggcagtcatgccgttttccgttttcacattggcgtactcaggacggatgtccaataacgcgctgatcgattttctggatcggctgacggccgctccctgaaacagttcaccgatttggtagaacagcatgaccgcgacgccttccggatactgatgaatcataaatgcgccgatcgtggcaagcgccatcagaaaatgctcatcaaatacctggccgcggacaatgttttttcccgctctggctacgatatcgccgccgataatcaaatatgaagcaaaaaagagcagaaactcaaggacggcgcccgtgtgcgcgaagtaagcgatgacggccaaaacggctcccgctgccaatctcactaacatcagctgcagcttttcgcggtattcatcctcgccgggtttgtcttcgtgcttcgaacgaacggtcacatgaggatcaatggactttacttttttcgcaacctcatctttcatccattgctcgtttttgccgccggctgagaccgtgatggtgcttgccgcaaaattgacagcacagccgtctatgccgtcaatggcttttacgccgttttctattttttttgcacagttgctgcaatcaagtccgtctaatacaaattcacctttggctgatttcattttcgactcaccctactttccgtaataggattcccataacatcaatacagctaaacgaatttatatatatgaacatatactcatatatgtgttttctctattatatgcaggctttgaataaagtgtcaataaaaaagacaaaacaggcatcagcccattttgtcttgtttcaccttctgtaaacgcaaagcattaaggacgaccgatactgagctgaacgccatggcagcgcctgccacccacggggccagaaagccggccgccgcaatcggaatgccgatgctgttgtatcccaatgcccagcctaaattctgcttgatgtttctcatggtcagcctgctcatgccgatggcgtcggcaatgccgttcaggtcaccgcggatcagcgtaatatccgccgcttccattgcgatatctgtgccggtgccgatggccattccgatatcagccacagccagcgccggagcatcattgatgccgtcaccgaccatcgccacgcgccggccttctttttgcagccgggaaatttccgccgccttttgttcgggaagcacttcggcgatcacgctgccgatgcccgcggcttttgcaatggcttccgcggtctttttgttgtcaccggtcatcatgatgacgtcaagccccatatcattcaggcgtttcaccgcggccggagatgtgtctttgattgtatcggcgactgcgataagccccgccgctttgccgtctgccgcaataagcatcaccgtttttccttccgcctccaagcgggccatgtgcggaagcagcgcctcatgttcgatgtgttccgattccatcagccgtcttgatccggctagaatcgttctgccgtcagcctcggcgtatattccggaaccgatccgggcttggaaccgggtgattttcgggatggcaatcccccgtttttcggctcctgacacgatggcttctccgagcgggtgctctgatcccgtttcggcggccgccgccagccgcaggagttcctcttcgttcattcccgctgccggtacggcatctgtcagaaccggtctgccgtttgtcaccgttcctgttttatccagtacgattgtcgtcagacgctgtgttttttctaaatgctctccgcctttaaaaagaatgccgaattcagctgcgcggccggagcccgccataatgctcgtcggagtggcaagcccgagtgcgcacggacaggcaatgacaagcacggcgatgaatttgccgatcgcttcagaaaactgtcccggcgcgacccatacataccaaatgagaaaagtcagcacggccagccccagcacaatcgggacgaaaatgcctgaaatgtgatctgcgagccgctgaatgggggcttttgatccttgggcttcttccacgattttaataatgtgtgcaagcgcggtatctttcccgacattcaccgctttgattttgagaaaaccgtttgcattgatcgtcgccccggtgacggtgcttccgggagacttatcgacaggcatgctctctcccgtaatcatcgattcatcaatcgcggaatggccttcaatcacttcgccatcgacagggacgcgttctcccggtttcacatatacgatgtcccccgtccggacctcatcaatcggaatcacctgtactttgccgtcccgctcaaccgccgccgtcttcgcctgaagcttcattaactttttaatcgcttctgatgagcggccttttgctttcatctctaaaagctttccaagcaaaatcaaagtcagcaaaatggcgctcgtttcataataaagcccctcaacatgtccgtctcgtccgagagacgcaatcgtcatgtacaggctgtatgcgtaagcggccgtcgttccgagcgcaacgagaacatccatattggcacttttgtttctcagcgccttgtacgctcccatataaaaaggccagccgatgacgagctgcaccggggtggcaagcgcgaattgcagccacggattcatcaggatatccggcatccagataaaagaagtaaaagaaaaatggctgaccatcgaccagagaagcggaaatgagagaacggcagaaaatatcagcctgatcagctgctttcgctgttctttttccttttgagataatccgccgtcttggccgtccgcttccttttcttctaatcggtagccgagttttgccacggtctctttcagttctttcggtgtcacctctttggggttgtattcaacggagaccgtttcaagggcgaaattcaccggtgcgctgtcaactccccctactttgttcaggcgcttttcaatccgattggcgcaagcggcgcacgtcatgccttcaatctgaaactcggttttttccgtcacgacatggtagccgagtttttcaattttttcttttatggcgcttgcttcgattttgtcagggtgataggaaatgtttgaagtctcaagtgcaagattgacggaagcgtcattgacgccgtccatccgtttcaaccctttttcaattcttgaagcgcaggcggcgcatgtcatgccccccacttgaatggtcatttctttcggttcactcaatgtcctcatctctcttcataaaccccatgggggtataattatgataaaagaaaaccgcgcccgtttccgcagcgcgataaatcctatacgacgtcataaccttgatcttcaatcgcgtcttttatatctgatacggagactttgttctcatcaaacgtcacatccacctgtccggcttccaatttcacctgaaccgccgtcactccgttcagttctcctactccggtctctactgctttgacgcagtgctgacatgacatgccttcgacttgcagtgttttttgttccatgatgattccctccatgtcttgttttttcttcttcatgttaccatacccctgtagggtatttcaaaacattttattttacgattttgcgatttttttcacaacatcaagcagctcggcaatcgcctgctccccgtttccgctctcaatggcgccggctacgcagtgatgggcgtgatcttccagcagatgaaacgcgactttctgcatggccgcctgtacggctgaaatctgcacgagaatatccacgcagtatcgttcgttatccaccatattctgaatgcccctgacttggccttcaatccgtttcagccggttcaggatctggtctttttccttggcgcttttatgatttaacgattgatgctcggtatgtttgtccattttccacctcggtttttttcttcgttatcttcattatacagacttgaaaatccggtgtaaaaaattttcaacacacaagttttaccagtacacccgcggggtatataatgttatcacttatcaagagggggaaactcattgaaaacgatacaagtcggcatattgggatatggtttgtcgggtaaagtctttcatgcgccgcttttggacgtccttgatgattatcagatcaaaaaagtcatgacgtccagaacggatgaggtcaaacgtgatctgccgggggctgaagccgtgcacgcgattgaagacattaccggtgatcctgacattgatctcgtcatcgtcacgacaccgagcggaatgcattatgaatcagcgatgaaatgtctcctggcgggaaaacacaccgtcgtggaaaaaccgatgacggcgacttcagcagaagcggaggagctgagaagaacggctgaaaataaaggcgtcttgctgagcgtgtatcacaaccggcgctgggacaatgactttttaacgatacaaaagctgattcgggacggggcgcttcaagacattcatacatatcaagtcagctacgatctatacaacccggttgtacaggaaaaatggcgcgaaaagaacggacccgccacgggaacgctgtatgatcttggttcacatattattgaccagacacttctgcttttcggaatgccggaatccgtcaccgcacatgtgatgaaacagcgggacaacagtgaaaccgttgataattttctggccgcgctccattacggcaaacttcaggtcattcttcaatccggctccatgaatgcggcaagcggcccgcgctatcagattcacggacggaatgcaagctttatcaaatacggaatggatggacaggaagatgcgctttcagcgggcaaaaagccgattgacgacagctggggcgccgatgatcctgacaacttcggagagctgacaatcgcagcggatgagaaaaggcatacagaaacaatcccctctgagaacggctcttaccttacgtactacaaactgctggcagacagcatcttaaacggaaaaccgcttcccgttacggcaaaagaaggcatcgatgtcatccgtgtcattgaagccgcaatgaaaagcagcgaacaaaaacggacgattgccctttaatatgaaaaacctcccagccgtacggcggggaggtttttttaagatcagaatgattttccggcttctttcgcgcgggcaatcgcatcttctttaatttgctgtgctttattcggttcagcattatggccttcaacgattaaaccgtcaaaagaaggaacgccgaagaagttcatcatgatgccgatgtaacggtggcccatttccatgtcagccgccggcccttcagagtaatagcctccgcgcgcctgaatgtggagcgcttttttgtctgtcaacagaccgatcgggccttgctctgtatatttgaatgattttccggctacagccacagaatcaaggtacgctttcataacaggcgggaatgaaaagttccaaagcggtgtgacgaatacgtatttgtcagctgccgcgaattgatcgctcagctcgttcagacggctgactttcgctttttcgttttcagaaagctcttcaaaacctgtgccggattgaagttttccccagccgctgaatacatccgcgtcgatatgaggaatgttctctttgtaaaggtcgatatgtacaacctcatcattcgggtttgattctttataagaatcgataaacgcttttcctgtcgccatgctgtaagatgtcttttcatcatgaggatgagcagttatataaagtacttttgccattgtaaacagccctttcgttttcagattacacacacatttattatgaaatatgaatgtttttttatactgatcagttctgtaataattatagttacaaaaaaatcttttcgcaacaataatatctcgaaatcagtgtatttttttgaaaaggctgcaatgacgggaatgacaagcagcggaaaaagcagaaacatttagtttctgctcaaaatcggattgggtctgcaggccggaatatccaacccgagattcccccgcagtgtatccgccggatagctttttcggtacagccccttttcctggaggatcggtatgacatgatccacaaaagcttcaagcatgccggggatgtcagagtgaatgataaacccgtccgccgcttcccgctgaaaccatgtttcaattaatgatgccacatgttccggtgtgccgataaaatgggttcgcggaaacgcggcttcgcgcgccacttgacgcagcgtaagattccgggctttcgcctcccttttgatacggtctgtcgtgctttgaaacgcgtttttcccgacgtcgcccaaatcagggaacggctcatccagcggaaaacggctcagatcataatcgtcaaaaaatctggccacatatttaacagcgttctctatcggaatcagctcggcgaattcttggtatttcgcttccgcttcttcttgtgagccggctataatcggactgattcccggaaagatccgcagcttggaagcgtcccggccgtaatccgccgcccgcttcttcacatcatcataaaaagctttcgtttcctcaagtgaattggagtgcgtaaagactgcatctgcattcctcgcggcaaacgaccggccggtttctgaagaccccgcttggaaaacgaccggctctccctgtttggaccggccgatattcagcgggccctccactttgaaatactcgcctttgtgatacaggcgatgcagtttgtcagggtcaaaaaactgcccggtttctttgttgcggacgaaggcatcttcttcccaggaattccacagaccgcgcaccacgtccacatgttcctgggcgatggcatagcgccggctgtggtcgggaaggctttctttgctgtgattgcgcgcggctcccgcctgcggagaggtgacgagattccagcccgcccggccgccgctgatatggtcaagagacatcagctgtcttgcgatggtgaacggctcagtgaacgatgtggaaaatgtgccgattaaaccaagatgggttgtagaggcggcaagcgccgataagatagtgatcggctcaaaccgatttaagaaatgcgggatggacttttcagaaatgaacaagccgtccgcaataaaagcaaagctgaacagccctctttctgcagtctgcgctttttgcctgtaaaacgccgcattcgtgcttgctgtcggatcggcgtcgggatgacgccagccgtccgttgtgccgccgacaccgtgaatcatggctccgaattgaattagatccgcccggctcattttctctccccctttttcccctcgtaatcggcaagcgcccgttctacatgttcaatgccgacttgagtaacggcctgatacacacggctgtcaccgctgccgagttcaacgacggggacatgacggatgccgtatttcatctgcagcacgtcacgcaattcgtcccgctccgtcacatcaattgtttcgtacgcaatggccttttcccgcaaatatcctttcacttcatcgcaataggagcagccctgtttgctccagaccactacgtttacttcatgactcatgttcatccctcctgtaattgtggggccggctgcaccgcttcgcttaacagccggtaagacaatcgtttttcctcagcgtttttgataggcgacaaaatcacaaaatcagtaatgctgtactgaacggataatcgtcgcagctcggcggcagtctcttcttttgtcccggcaatcacacccgtcttttgtgtaatcagcttatatggctgcgtgacttgttcaagaaacgcttccgcttgttcccgggaaccgacattcacctttttgccgtcttcgagaatgattttgaccgactcacgcgatacgacgtgtttttccgcttctgcttttgtatgcgcggtaaagaccatcggcgcaaggtgaaattccgccttcgatcctttcggcagatgctcgtcaaaggcgtggcgcgctttttctaacgcagcctcttcaccgtttatgaaataggcgaaaacgaaggaaatgccgagtttggccgcggatatcgcgctttccgcgctgccgccgagcaaaaagaggtcaggcgcatactcagtatgcggcgccggccgcaatgacgcatagcggtgcgagtccggaaaatcatttcggatgaaatgagtcagctcctcaagcttttcttcaaataaacgggcgggctggataagctcccgctgcagcgcatcggttgacagctgaaatccgccgggcgctttgccgacaccaagcgccacacggccgggagcaagagcggacaaaacccggaactgctccgccactttataaggactgtaatgctgcagcatcaccccgccggatgcgagacggatttttttcgtgcttgcggcaagataccccagaacaatttccggcgctgatcccgctatctcttcattgttatgatgctccgccgcccagaaacggtcatatccgtattgttcggcctcctgagccaatttcaccgtttgccgcaaggcttcttctgcggtttggttttccgcggtgacactttggtctaaaatgcttaaacgaatcatacgacaggctcctttatgcgctcttttatgtcataaccgtaatcaggcagcacgcggcggaggaacttcttcgttctttcttttttcgtcttgtaaaagacttcctcaggcgttccttgttccacgattgctccttcatccataaacacaattcggtcggacactcttctggcgaattccatttcatgagtaacgatgatcatggtggcgccggtccgcacaatgttaagcatcacctcgagcacctcgccgacaagctccggatcgagggctgcggtcggttcatcaaacagcatcacatcaggatgaatggcaagcgccctggcaattccgacccgctgcttttggcctcccgacagctgattcggataggcgtgcaatttatcctgaagccccaccttggccagttcccgctcggcaatggcgtacgcatctgtttttttcattttccttgcgaccgtcaggccttccataacattttgaatcgccgttttatgcgaaaacaaatgatattgctgaaaaaccatcgccgtctgtttcctcagtctgagaatgtcttttttggcaggctttttgcagttaatgacttcaccgtgcagcgaaatggcgccctcatccggccgctcaagtaaattaaggcagcgcagaaaagtggttttcccggaaccgctcgggccgatgatggtcacgacttctcctttccggacacttaaattgatcccctttagcacgtgatgactgccaaaatgtttctgaatgtttcggatttcgatcataatgcgcctccttgatatctggccgcccttttttccgccagactgtttacagcttcgaggatcagcgttaatccccaataaatcacggccgccccgataaatgcttccagaaacgcatagttatcggatgccgcaatcgtcgccgttcctgtaatctcaggcaccgcaacaatggccgcgatggaagtggtatgcaaaaagccgatgcctatgttggtgaagttcggcagcgatatcatgaacgcctgcggcagaaccacacgccgaatcatctggccccgcgtcaagccgattgaatatgccgcctccgcctgccccgtatcgacggccatgatcccggaacggagaatttccgtcatataagcgcctgccgttaatgacagtgccatgatgacaaacacggcgaccggaatctgattggccgaccagccgagatgaaacgcgcggctgaattgatcggcaatcagcggaacccctaaataaatcagcataatatggagaatcgccggggtgctgcggaaaaaagacacgtaaaacgctgagcaggccagcagccatttgatgcggaatatacgcaccgtgatattgccgagagctatgaaaaatccggcaataatcggaatgaccgtcatcgccaatgtaagcggaacggttttcatcatttgtttgatcgcagtgccgataaatgaaatgtccagctccactgttctccctccttttcagccgtgcgcgctcatgtcaaaaaccgtcacaaggcgcgtctcatctttcttgattcgtttttcggcccatctgaagacacattcaaataaaagggcggccgcataatacagaacagaaagcgagatatacacttctaaagaatgattgctcgatgtaatcaaggtctgtcctctgcccgacatatccatcaccccgatcgaaaaagcgagtgatgtatcttttaagaaaccgattaccatatttccgatgttgggaaaggcctgcacaagcgcctgcggcagaatgatgcgccggaatgtctgccccccgttcagcccgatgctgaaagccgcctccgcctgcccgcggtcgacgctgttcacacctcccctgatgatttcggccgctcttgccgcgctgctcagcgcatacgtggcgatggccgcatacaaagggtccattttagaggtatcgattccggcgagcgccgtgagtgccggaatgccgtaaaatacaatgaacagctgcaccatgatgggcgttcctctgaaaaaagagatatacagcttcgcaaactgattcaaaacgggaatgcgatagatgcggggcagcgccaaaagcagccccaatagaaagccgaacagcaaagacaccgccagtatatacagcgtgacgggcaaatacccgagcaatgtcggcacaaaggacgcgatcatactgatatcaaacgctttttccattgccgatcctcctctttttcacttaatattgctcctttgaataatccgcgccgagccacttttcactcagctttttaagcgtgccgtcatcaatgatttccttgagggctttatcaatgtcatcgctcagcgtttgttcatttttgttaaacataaagaacactttggcatttgacagcaccccgccgaccgttttttctttaatcgcgctcgttttgttttggaaatcgacggcaaacggcgtagaaatcgtcgcatcggcgcggccggatttcagctgattggccgcatcgtttgaaccttggcccgcataagcgatttcaaacggactgccgtgtttttcattccattttttcagcacaagcgcgccgtttgacgtcggactcgtaatgacccgcttccctttcaagtcctcaatgccgtgaatgttcccgttttcttgaagcaccgtgattttcagcgggaagttgttatacgcgacttgattgaacagaaattttttctcccgttcggcgcttttttccatttgatgggctacgatatcgactttatgctggccgaggctgacaagcaggttggagaaatccatcgttttaaaagtgaaacgatagtccggcaggcgcctgtcaagctctttcaccagctcaacgtcgtagcccgtcaatttgccttcatcatcaataaagcaaatattcggaaattgagtgccggtgccgaccgtaatgttcttcacgtttttctgattgcctgatgccgcctccccgcccgcgccgcaggctgataacgccgccgttgcagcaattgttaatgacatgaccgccagtcttattttcatgtgatcgccccgttttctgcttcaattatttcgtgaaacttgattttgaataatccgcgccgagccatttttcactcagccttttcaatgtgccgtccttctcaagcttttgaatcgcccgatccgtatcgtccgccagggtttggctgtttttattgaacataaaatacacctcggtatccagtagcacatcaccgaccgttttttgtttgaacgcgtgcgtcttattttgaaaatcgacggcaaacggcgtggatacggtggcgtcagcgcgtcccgtctctatttggtttgctgtatcattgccgccctgcccggcgtatttcaaatgtatcgggctgccgtgggttttgttgtatgccgtcatataatccgccgcgtttgacgtcgcgccgacgatgacggttttcccttttaaatcccggagcgtgtgtatcgcgtcattatccgccttcaccgtgaggtacatcggcgagtagttatatgggatcttgtgatacaaaaagcgtttctcccgttccttatttttcgccatattatgcgcgatcacatcaattttccggtttcctagacttgtaagcagattcgaaaaatccatcgtcttaaagacaaatttgtattgcggcagctgttcatcaatggctttcatcacttcaatgtcatagccggtcagctcgcctttttcatccataaaagcaatgttcggaaaatcagttcccgtgccgacaatgacggtctgcacgccgctccccgcttttgtgctttctccttgcccgcacccggccagcacgccgagcagcagaagcagacagccggctctgatccgtttttttatcattgcgcccagctcggtgtgcctaacagcgacgcgtcaaaccgctccgatatgagcacctttctcatcatgactccgatgtctccgtctttctcctgctcaaaatacacttcataccccctccgtctgtacatatctacaagccagggatgcttgcgcgccgaagtgccgagcgtgatggccggggccttcagcgtatcccgcagcacgtgttcctccacataagtcaaaagtttgctgccgatgccctgccccttcagctcaggaagcgttgcaaaccaccagacgaacggatattttgacggaggcgtgtcactctcccacggaaaacggatcgtaatggttgaaagaatccgtccgtcccgttcgagcacgacggctgaatgattttcaatattttctgttaccatatcgatgtcggcccgcgccgacggccagtcaatctccaaattgcggatcggctgaaacgcgctgtacagcagctctaaaaactccggcgcatcctttttctcagccaatcgaaatatgtcttcactcattccggtcactctccccgcaaaaatatataattccaatttgtttactaagctttgattgtttatactataaagcaaactgatttatttgactaatcaaaaaaagtaaaggaaaggttcaagaaaattaatgaacagccgggaggggatttcgttggaattacgcaccattaaaacgtttcatacgatcgtacagtcaggcagcttttataaagccgccgaaattctgaactactcacagccgacgatttcaatgcggattaaacagctggaacaggatgtaggcgcgcagctgtttgaacggggaaagaagctgaagctgacaagggcggggcggctgtttcatgagcgggccgggcagcttctcgcgcaatacgaggtgcttgaccatactctggccgatatcagacaggggcaggccggccttattcagatcggcatatccgaaccgacggcaagcctgatcttccctgccgtactgcggggtttcttaaatgattatccggacatgtcggtcaatgtcagcgtggatgacgccaatacatgcagccgcaaactgctggaaggcgccattgattttgccgtatgcggcgagccggagctgattctggagaattatttcgatccgttttttcatgactcgctcaatgtcatcgtgtcagacagacatccccttgccgccaaagcaagcgtcaatctcgaggatttagaaaatgaatgcctgatttttacgcccgccaattgcccgatccggattcaaattgaacagcacctgcagcggtccatcggcagccgctatcgaaaaatggagctgaccagcagcatggctcaccaatactatgtcagggaaaatatcggcgtctcaatctttacggcgacggcgcattcagaaccgatcgagggagggcacgaaggtcattccgatccataacttaacaatttcaccgccggtcgggctgttgacaaaccaaaaagaagagcattttgactccgccacaaaagatttaatcagcaggatcatcagccggtttcagcgtgatccacattaaaaaaacccccgctttacgggggtttttgtacgttcatcttatataatgctccgcaccaagccgccgtcgatccgcaatgcagatccgttaatggcagacgacagcgggctgcttaaaaaggcgacaaagtgggcgatttcttccggacggatcaatcgctgaatgatcgacgtcggacgattttccttcataaatcgtctctccgcctccgccgcggtcaggttttcaccgggataaagcgactcaagcatcgtttcgacgccctctgttttcgtggagcccggcatgaccgtattcaccgtcacattcgtcccttccgtgagctcggccagactgcgtgacaacgacagctgcgtcgttttcgtggcgctgtagtgggcatttcctgagaaggcatgacggccgcttcactcgcgataaaaataacccgcccttccttccgttcaatcatccgctttgcataccggcgtgtcagcctcacgccgctcatgatattcacctcgaaaaaccggagccactcttcgtcaggaatatcaaagtattccgcaggttcaaagattcctaaattgttgacgagaatatccacatccggatactgctgaaaaatcgccccgcatccttccgccgtgcctaaatcaaatgcggccggatagagacgggcatccggcgtctgtttctctagttcccggatcgtttcgttcaccttttcttcacggcggccgttaatgatcacggccgcaccttctgcaatcagcgaagccgcaatcgccttcccgatgcctgacgtagatcccgtcacaagcgccgtcttccctttcaactgcaaatccatcatccattcctccctatcgcaagtctcttcttatatatggactgaaatcgaaagcctgaaaccctccgtccctattatcggatagaaaaatggatgaggggaagtacgcactttttagtgcctgtccgttgtcccagctgacggctgatcgatttgaatgacaaaccgattccctaactcttcttgagcctcttgaaacagctccaagacatcatcagcatccgaacccaattccttctgactgatgtcaaaattcttccacaccaaagtcagcggaagttcgatccagcctgtcagacaatcccataaggcattcagattttcaccataaaagtccgggaaatctaattgatcttttaagattcggtgtaaagcttctgtgcttgtaacatcttttccgtctatgatgacgactatcattcaaatggactcctttatttcggcatgaaaaaaccgcagtgcggtcaagtgacggcactgcggttcctctgttatgtatggagacggtgggagtcgaacccacgtccagaaacatcgattacttaagcgtctacgagcgtagcctgcatatttcgtgtttcactcgtcttcgtgcctgcgggcgggccttccgagagctagtctgtcagtctcttcttacgttctcagacgggaacgcaagcgtagcctacttggatgtgctcttcacggacacataggcaatgtcaggaagagctcgctgcgtttattaggcagctagtgctaagttttggttaaaacttttagttttgccagttatatttaggtgcgtgttaacgagatcgcctctcggctcgcagctcaagctcgatccatccctgtcgaatccgtaacgtccccttgttaagggtatacgggagatctatcaagctcttgctcaactggctgtactgttattataccatgatcacaggcaaattcaattgggaatgtcttcaataaacagcctgtgaatctgatatgtgaacagtatagcatacggcagttatcacatcaaggctcaggcatcagaagcctttttgtctgtctctgaacgctctttcgatttctcttttggcgtcttttcgttttaaatcttcgcgtttatcgtatgttttcttcccttttccgaggccgattaacactttggcaaagccgtttttcaaatacagcttcagcggcacgagggaatagcctttctctttcgtcagaccgatcagcttattgatttctttccggtgcatcaaaagctttctcgtccggagcgggtcgtggttatagcggtttccctgctcgtacgggctgatgtgcatgttgtggaggaacacttcgccgcgctcgattttcgcaaaggaatccttcatgtttacgcggccggcgcggatggacttaatctctgttccctgcagcacgatgcctgtttcataggtttcttctataaagtaatcatggtttgcttttttgttttgcgataatactttgcctgatccttttggcatgccttctcctcctctctccgcaaaaaccgttcatgtgtgcgatacgctttattttagcaaatggagcgttccgcgacaatgaaaatgcggcttgcgaaagaaagcaaacagagcattttgccccatttgcttttcgcatttacttcttctttttgcgtttttgtttcggcgcgttttggaaaccgcgttttttctttttcttcttcggttttgtaaaccattcccctttttcctccgatttcggcggtgaagccggggtattgctgtttaacacgcgtttccgcgccggtctgccgcgttttctgcggtcgcctgtcgtttctctcggacggcgggtgcctttcatgccgacaatctcaaagtcgatgtttctctcatctttattgacgtcgacgactttgaccgtgatttcatctccgatccggtaaacgttgcccgtgcgttcgccgatcatggcgaaatgctgctcgtcaaaacggtaataatcatccgtcataaagctgacgtgcacaagcccttcaatcgtattcggcagctcgacaaacattccgaaattcgtgacggaactgatcatgccgtcaaattcctcgccgattttatcaagcatatattccgcttttttcagatcgtccgtttcccgctctgcatcaacggcgcgacgttccatcgttgacgtatggtcagcgatttccggaaggcgttcggcccacttttcttgagtcgcttcgtccgattgtccgttgatcaaatacgttctgatcagcctgtgaacgattaagtcaggatagcggcggatcggcgatgtgaagtgcgtataaaattcagtcgccagcccgaaatggcccaggctttgcgggtcgtatttcgcctgcttcatggaacggagcatgacggttgaaatcaccgtttcttccggacgatcccgcacttcatcaagaatgctttgcagcgcgcgcggatgaatgtctccggcttttcctttgacgatataaccgaatgtcgtgacgaactccaggaacttttgcagtttttcggcgttcggctcttcgtgaatccggtaaataaacggcacgttcatccaatggaagtgctcggccaccgtttcgtttgcgacaagcatgaattcttcaatcagcttttccgctactgagcgctctctgatgacgacgtctttaacggcgccttcctcatcgacgagcactttcgcctctttgaaatcaaaatccacggcgccgcggtccatccgtttcgcccggagaatttccgccagacgttccatgtctttaaacatcgggacgagcggctcatatctttctttcagctcggcgtcgtcttctgtgaggatctggttgacatctgaataggtcattctttccgtcgttttaatgacgctttggaagatctcgtgctctgtcacctggccctgctggttgattgtcatttcgcaggaaagcgtcagccggtcgaccttcggatttaaagaacagattccgttagacagtctgtgcggaatcatcggaatgacccggtcaaccaagtacacgcttgtccctctatccagcgcttctttgtcaatcggggaattctccgtgacgtaatggctgacgtccgcaatatggacgccgagcttgtagctgccgttatcaagctttgtcacggtgacggcgtcatccagatccttcgcatccgcgccgtcaatggtgacaatgacctgatcgcggagatcacggcggtctttgatgtctttttcatcgatggtatcgggcgtgcttgttgcctgctccatcgcttcagccggaaaatctcccggcaggccgtgcttatggatgatggataaaatatcgatgcccggatcatttttatggccgagtatttcaacgatttctccttcggcgttcattctgccttcagggtagcttgtcagtttgacgacgactttatgaccttccgcagccccgttattggcatgtttcggaataaaaatatcactcgtgattttcttatcatccgggatgacaaaaccgaagcttttcgtttctgtgtatgtgcccacgacgcggtcgatgcttctttccaagatgcggatgaccgtgccttcctgtctcgatccgcttgactgggaattgagccgcaccatgacgatatcgccgttcatggccgtattcagctcattcggcggaataaacacgtcgcttaaagaggtatcctccggcaatagaaacgcgaatccctttgcatgcgcggaaatttttccttttactaaattcattttttccggaagcccgtagcggttgcttctggtgcggacgatctgtcccgtctcctcgagcgccaccagcgcttttaccagctctttaaattcatctgcttccgtgatgttcagcatctcctcgagttcctgaacggtaaggggcttgtacgcctcttccttcataaacgcgagaagacggtccataaacgcttctttttccattattcgacctcctgtttgttaccaatcgagtttctctaaaaattcgtacacatcctgatgaacgaggtcccgttctttatcgagcgtaatgacatggcctgattcttcataccatttcagctgtttgtcgtccgtttccacctcgttgtaaatgatgttcgcactttctgtattaatcatatggtcatgccgtgcctgaaccacaaatgtcggggaatagatcatgtcgacgtttttgcgcacatcggcaatcagctcctgaagcgatttgagcgtattcatcggtgttttttcaaactccttcatttccttttcaatctgctccggctgttttccttcgaattttttataattgcgcgcgtaggaaagaactccttcgtacataacctcttcacttttaatgtgcatcggcgcacacataggaacaattccctttatgggtacagtgtaacccaatttcaatgaaaaaaccccgccaagcgacagtccgcaggccgcaatgttttcatagccttcagaccgtaaatactcataaccgtccatgacgtctttccaccaatcttcaggccccgtatgtaccagttcttccggcggaacgccgtgccctttatattgaggcgcgtgacaagtgtagccgcgctcattcaagtagcggccgagcattctgacgtctgccgtatttcccgtaaatccgtgcagcagaagcaccgctttgtctccgcctttaaatgtaaatggttttggtgtcacaattttcatgctcataaccccttttttgcacattcaatttagttttccacagttttgcgagaaacaaacgccgtctctcaacaagaaaaaggcctgatattaaatcagaccttatacaaacattgccttatacgatatacgccagcgaaatcgtcaacacgaaaaacaagactgccagcacaacggttgtgcggtgaagaatcagatcaaggccccttgctttctgttttccgaaaagctgctccgccccgcctgaaattgcacccgataaaccggcgcttttgctggtttgaagcaatacgacaataataagtgcaatactgacgatgaccaataaggtaatcaataatgtgtgcatcccatacacctccagactgactggcctacattgcttctattttacatgaaaaacaaaggcatgtcacgccgtatcggtgcacatcatgtcagaaaaacggaaatgcgtttgaatcttccatcatcattgacttttgtcaacaaagtcgtagtaaaaaagatcttcaaatttcatgtcaaagtaatagagcatttttccgatgaccagctggcccggcctccgctctccattcagtacacggctcagtgtggcgggggatattccgatctccagggcgagctggtttaacgagtagtcattattgaccatatactgcagcacataatctcttctgatctgtatcttttcgaccactttcttcaccttccgttctgtcaaatactttctttcttatacataagatacggcttttgttaacttttgtcaatacttttccagcctggctattccctttagtcaataaacatactagaatataaatagaccgcgggagggggaaagactgtggaaagcttcgggaaacaattgcggacattgcgggaaaaaaggcatctgacagtgaatcagctggcaacgtattcaggcgtcagcgccgcgggaatctcgcggattgaaaacggcaaacgcggggtgccgaaacctgcaaccattaaaaagctcgcagatgcgttaaaaatcccgtatgaggaactgatgcagacggcgggatacatagagaccgttcaggaaacgagagccccgtacgacacgggctgcaccttgctggaaaaagccgaaacgtttgagctgcatgatttatccctgttggagcgggagaactggcggcacctgtcgaaagaagacttggttctgcttgataaatactttgcgttcttatcggctgaagccaaaaaaagaacaaatgaagactcatgactttgcacatgtgaggcgatcttattgaacacattcggaaagcaattaagagagctgcgccgcgcccggaagcttaccgtcaatcagcttgccgtctattccggcgtcagctcggcgaccatttccagaattgaaaacgggcaccgcggcattcctaaacccgcgaccatccgaaaattggcggacacattaaaaattccgtacgaggagttaatggcgcgggccggacacatcaaggcatttcaggaagaaatccgcgaaacctccgaaagctatcaatccatctgcgccatctatcagaccgccgttgacagaggcgcggagcatctgccgctgtttgacagcaaaaagtggcagcacttcacaaaagaagatattgaaagcgtcagcaaatactttgattttatcgcggctgaagcgaaaaagcgctccccggattcctcatcctctttttgatcctctcctcaacttaacaagcgccagacgtacgttccctccgattttgcggtataatagcagaagacgaggtgaaaaagcatgaaccaatcagaaatgtgccccagattcgaaaaagcggtcgacatcctaagtaaacgctgggtggctctaatcgtctttcagttattgaacggacagcagcgatttagcgaaattgaagcggcgcttccgaatttaagcggaagagtcttgtcagaacgtctgaaagaacttgaaacagaaggtgtcatcaaacgggatgttatccccgaaacgcctgtccgcattgagtattctttaacggaaaaaggctgcgcattagcccctattttagaggaaatttccaagtggtcttcaacatggattgatccttcctgataaactcttttccgcataagcggctgatctctcaaacggacagccgtttttatttttgcttttcttaaacagaagaacaagccctcaggcgtgcagggcttgtttttgtctgacgccttccagcggaattcgaatctccgcccgggctcctccagactcctgattttcaagtattaattcgccgtggtgaagatgtacgacatgatgggcgaatgtaagccccatgccgtgatgccccgccgaatgtctgcttttatcctccgtgtaaaaaagctgtgtcgctcttttcagcgcttccggcgagaacccgcttccgctgtcggatacggcgagatggagggcggaatcggtgcacaggacgtccacacggatttcccctccttccggcgtatagtcgacggcatttgccgcgatattcatgaccgccctgtggagcagctcatgatcgatcggcgcttcaattcggtcaattccccgttcgctgaggacgagatcaatctgtttcggccccgcaagcgccgccgcgtcacgatatatgttttgaatccactctttgaggtcggtatattccacatgaacggcaactgcctcctccgctttagaaagctggatcagctgtccgacataatgctcgattttgtttccggcatccagaatatactgcgcatattccgcctgctcctcatcaggctctgttaactgaagcagctcggcatttcctttaatgatcgttgccggaattttaatatcatgcgcaagcgcgccgatttgttctttctttatccgctccgcctcccattgcgccgccagagatgcctgaagcgcgtctttcattttcagcagagagtcaatgacatcgtcaaattcctttatgcgcgacctttttggattgatatttaaattctgtttttgaatgcttgccgtaatggagctgagtgtgctgaaatgccgtctcagctgattggcgaaacgcgtcgtcacgataaaaacggtcaaaagaagcaaagtgatcagaatcgtaagacccgtccattcataattcggcagatagcgccttaacagcggcgactgaaattccgacctaagtgaatattggagaacgccatattcatctttccgatttatcaccatgaatcctttttgagcataattaaaatacggctgatgctgaatcttttttctggcgttggccgcatcttgttccgtcatcgttccttttgtcatccgctttgtttttttatcaaaaacagcgtatgtcatacctgcggggatcatgtcttcggttatcttttccgttgatttcaggcggggtttgatctgttccgcctcatgctcgctgtagtttgcgggcaggatcgctccggcattcatggcaatggcatttaaggcgacacataatgccgccacccccatcgtgctcagacacagtgtgatcgtaaatttgacaagctctttgcggatgctggattttccttttgctattcccatttgtatccgacaccccacaccgttttgatcggatcagccccgtgttctttacattttttccggatggttctgataaactccgtaatggttgaatagagcgcatcgccgtccaagccgtacacttcctcgtaaatctgctcccgtgagaatgttctgtttttatgctgtgccagacattcaacgattttatattcgtttttcgtaagaggaagtttccggtcatcaatccatacttctttattgtcaaaatcaaacatgaagcctgatatcagccgtttcgtctgatgcttttcccgccgttcccttctgacatgcgcgtttacccttgccatcaattcctgtatgccgaacggctttgtgatgtaatcatcagcgcctgtcatgaggcctttcacaatggattcttcgtcagactttgccgttaaaaacaggatcgggctgtccaccagcggccgaatccgccggcagagttcaatcccgtccgttccgggcatcatgacatcaagaagaatcaaatcatagccttgaaaaaaatccaatgactgatcctccgctttttccagaatcgttactgtatgctgatcacgctgtaaaatgtttctgatcagaacgagaatatctttttcatcatcaattgctaaaatgtttgccaccggccgaatcgctccttgcctttattcatatgaacgccgcccttcccatcttctgcaccaatagaggccggccagacataatatcactatagaaaaatataacattatttctccgaatctcatatcgtatcttacataagggaggaactcttttttgactttgtcaaaatgcagcagtcctgcaaggcctgaaagccgcacgctccatgcccacgggaaaaaacgccagatgatatcgccaagtcccgtattcatgagcgccgccattaataatcccgcaccccctaaaagcccggacggccccatgccgtattttatgccgacaaaaaaagacatcatataaagcggaatactgccggcaatcagccacgcccctccttttaaaaagagaagatacgggagatcattgatgtgaagaacaaatttcatccccgccaaataaagacagatggcgagacctaccgataacacattcaacagcagcagcaaaagcagcttgcccgcaaaactgatgattttagaatgcggaaccgccagcatcatctgaaaatggcccgcctgttcctcaaccgaggcagacatgccgcagacaatactgatgattaaagggtataaaacggcaatcgcactgaaaaacacactgtacagcatataaggctcctgaacccttccatacatatacaaaaggaaaaatcccgcgcataaaaccggcgccgcagcatgcatccatatgagcggcgtgcgcttcatttttaatacatcggcccacatatatcgtaaaagcacggtcatgaccggtttcccccttttgaaaaagacacggcggaaacaaaacttattgcgataaaagaaagaatagaaagaataatagccggaatgatcacgtttccgtttaataagccgctgtttgcgggaagcggaatcccgttcggatggatcccgagaatcggtgacatcagccggactgaccagctccatggactcagccaccacaatgagcctgacgccggcacaatgcctaaaacaaaggcggcgatcatattgatgagaatgactgccgtaaacccgaactgtctggcaatccataagcagaacggaatttcccaaagcgtagacagccacaaaagggagcttgcttcaatacctttcagctgaaccgcagcaattgccggaaacacaaggccgagcaaaaacatgatgactaaaaagacgatttgcgataggagtgaatacagcgcgatcaagcttatttttgagaaccatatgctcttcaagtcagccggcagtgagtacaccgcacggtcattcgctgattttttctcttttttaacagataaaccgcacattagagcaatcatgagcggcatgaaaataaccgcccaccaattgaacgtgcccgtcataaaataggcggcattcagcagaaaagaaaaagccgtgttcagaagcgggataagaatgatcagctttctgataaatgttcttttagatgtaaggtgttccgcctgcatgtactgaatcattttcctgtccccgctttctcccgtgttgatttgactacctccagaaacagccgctccagatcgtcttcccggctgatttctccctgatatcctaaaacgccgtcactgatgattccgatatggtctgcgatctgctcgacttctgataacaggtggctagataaaataaccgtcattccctgtccgggcagggagcggataaattcccgcaaatcctgaattcccatcgggtccaatccgtttgtcggctcatcaagaattaagaacgacggacggtttaataatgctaacgcaatgccgagacgctgcttcattcccatagaaaattgtccggcgcgcttttttccggttcccgttaatcccgtgatttccagtacttccgcaattcttgaatcaggcagtccgagcatcacgcagcggactttcagattttcagcggctgtcaagttgctgtaaagcggcggcgcttcaatcagggaaccgatgcttttcaaatcttcgcgcttccatgtatgtccgtcgaacagaacctcgccggatgtttgctgcaagattccggtcaatattttaagagtcgttgattttccggcgccgttcggaccgagcaggccgtatatactgttccgcttaaccgatagagacacatcaaccactgcctgttgtctgccgaatgatttttgcagctgtctcgtttctaagatgttgctcatttgattacccctctgctttgttatttgataagtaagactttacagcgcagttatcaaaatttaatcaagaaatcaaaaaaaagcatccttcacgcggaagaatgctttttttcatgaggctgagcgtacgatcagctttcttttttgttttttcaccgggctgagcgctcgttccagccacgccatcagcaggtctgcggctaccgccatcagcgcggtcgggatggcgcccgccaaaataatggcggttccgtttgtcgcgttcgaccctctgacgatcatatcgccgaggccgcccgccccgacgaaggtgccgatcgccgtgatgccgatcgcaatgacgagcgccgttcggagacccgccataatgacggaaagcgcaagcggcagctccaccatacgaaggatttggtatttcgtcatgcccatcgcttttcccgactcgagataagcgtgctcgatattgataatgcccgtgtgcgtatttctgagaatcggcagcagtgaatacaaaaacaaagccgtgatgaccgtattggcgccgagtcccatgacgagcatcaggacggcgagcatcgcaagcgccggaacggtttgaatcacgttcgccacagcaaacacccagccggcgagacgcccgtgccttgctgtcacaattccggccggaatggcgagaacggcggcgaaaacgacgccgtacgccgacatgagaaagtgccgccagcactcatacagaacataactgccgttttgagcataatacgtaaacagctccttcatcgtgtccatccgcacatctcctttccgttattcaaagtaatgatgtttttctaaatattccttggccacgacggacggctcttttaatcggccgtcaacttcgtaattcattttctgcatcatctttgtatcaatcgcgccgatcattttattgatcacgccctccagttcgggatgctcttttaatacttgatccggaacgacgggtgaacagtcatacggaggaaagaaccgcttatcatccttcagcgttttcagtccgtaagcgatgattcttccgtcggtggaatacgcgagcgcgatatccatctttctgcttttcagcgcgtcgtaaacaaggccgatctgcatcggatacgtgccttcaaatgacattccgtatgtgttcataaaatcctgatatccgttgcctctcagcttcatccagtagttatcgacgccgaatttcagatgagacgcttcttttttgacatcggataccgattctaaatgatacttgcgggcaagctgtccggaaacggtaaagacgtatgtattatcaaagccgtaagaatcaaaccatttcatgtcatatctgttttgaaattcacgctgaacgagccgcagcgctttgtccgggtctttttccggctccatgcgaagcgtgcccgtcagcgcgtctcctgtatagcgcgtcgcggcgatatcaatatcaccgtttatcaaggattgctgctgtacggcattggagccgagatttttaataaccgttgtcttcaacccgctgtgatgttcgatcatctgtccgagcatgctcgcgatgatttctgattcggtcatgctttgcgcgccgattttaatggtgtcctccgatgcggcgctcaatcccgggagcgagcatccgccaaggagcagcatgccgatacaggcgattgcgagcagccgttttttgcatctattccccatgagagacctcctccttatgaagcgtcctttatgcttttcagcccgtcaggcgtgactttccgttctgtcatccccagcatgtaatcgacggctgccgccagcactgtgaccggaacggcgcctgcgataatatactccggctggtaaaggttcaagccgataaaaatgtaatctcccagcccgcctccgccgataaaggaggcgagcgtcgcccagccgattaaataaatcgaagacgtcctgatgcccgccatgatgaccggagcggcaagcgggagctctacaagcctgatctgctcccatgccgtcatgccgattccttttcccgattccagaagatgccgattgacgccgagaatccccgtatacgtgtttctgagaatcggcagcatggaatagaaaaacagcgccgcaacggccgggacctttcctacgcctaaaagcggaataaaaaacgcaagaatggcaaggctcggcaaggtttgaatgatgttgacgatgccgatgacggcgccggctcctcttttcatcctcgtcagcacgacgccgagcggaacggcggcgagaatgcccgccatgacggcgattaatgagatgtacagatgctcccatgttttataaagcatctctcctccatttgcctgtaaaaattgcacggtctgattcatatcaattgaagcctcctcatgacatcaccgcgagctgattctcttctccccagatggagtcatagacgatgtcaacgaggcttgcccttgtcacgattcccgttagccggccggcttcatcaatgaccggcacaaatttcatgcctctttttaaaattttatggacggcgtcgcgaagcagagtgccgcttctgaccgtgtacagatcccgctcaagcacttccgcgacggttaccgcttgtcttcgtttgcggtcaatcatctccacatcgacataaccttggagaacgttcttttcatcaatgacgagcagcgaatccacccgctcggcacgcatcagctgaatggcggctgacagtgttttctcaggtgttaccgtcacgggatcgggattcatgatctgctccacccgttcaatatcagggctggatgattggatcagccgttccttgccgataaactcctcaacaaattcattcgccggaaatctgagaatctcatcaggcgttccggcctggacgatttctcccgctttcagaatgacgattctgtccgcaagcttgatggcttcgtccatatcatgggtaacaaatacgatggttttatgtaaggttttttgcagttttttaaattcttcctgaagggaatctctcgtaatcgggtcaagcgccccgaacggttcatccattaagatgagcggcggctctgcggcaagtgcccgtaatacacctattcgctgctgctgtcctccgctcagttcatgagggtaacggtctaaatattcaggacccatatcaacgagctttaaaagctcccgcgcccgttccttccgtttttcggcaggatgctttaaaagcttcggaacgagcgtaatgttctgctgaatggtcatatgcggaaacagcccgatctgctggatgacatagccgatgcttcttctgagttccaccgggtcttgttccaaaatgtttcggccctctatcaggattctgccttctgtcggttcaattaagcggttgatcattttcatcgtcgtcgttttgccgcagccgctcggcccgataaaacaaataaattcgcctttggcgatattcaggttgatgctgttgacggcttttttcccgcctttatacattttcgagacattttctaatgtcagcaaacactcacacctccatgattaaatttattcaattcgttaaattcaaatttaacttttcagacaattgaacgttttccattataaattaaactttgtaaattaaaaagtttacaatttgtccatattatatataaaggttgtgtaagcattgattaacccgtattgaccggcaaagttcttcttattgctccggattactgccaaattctctcggaagagcatttccgccggtttaaaaatgtggtatattgacatcggaattgctgactgaaaggattgaaactgttggagaaagatccgttacacgtaatcgaacaagctgaagatcatttgatagaacgaatcgctgaaaatatgcatacattcggaatgcccgcgacggtggggcgcattttaggcattatttatatgaaccgcaagccgatgaccttaactgaattatcagaagcgaccggcatgagcaagacgagaatgagtcaggcggtccgtgaaatgcttgacgtcaatctggcggaaaaagtgtttgaaaaaggcgtccgcaaagatttatacgacgtcgagcaggattattaccaaacctttattacgctgtttacggccacatggagcaaggtcgtcagcaaaaataaaatgatgcataaaaagctgaaccgcgaactgacagccgtccttgaaaacggcgtaccggaagaagctgaggaaaaaatcaacgaactgctgaaagaattaaaggattggcttgattactacaactggatcagccgtctgatcgagttttttgaaagcgaagaaattttcaagcatgttccgaagccataagaaaaaaacgccctgacccgcaaggcgtttttttcatgccgcattcggcgctttggttcgttttttctttctcaccggactcagcgcccgctccagccatgccatcacaagatctgcgataacggccatcagcgctgtcggaatggcgccggccaaaataatcgcggttccgttcgtggcgtttgagcccctgacaataatgtcaccgagtccgcccgcgccgacaaacgtaccgattgccgtaatgccgatcgcgatgacgagcgccgtccgcagccccgccatgatgacggaaagcgcaagcggcagctccaccatgcggagcacctgaaatttggtcatgcccatcgcttttcccgattcaagataagcgtgttcaatgctggcgattcccgtgtacgtattccggatgatcggaagaagcgaatataaaaacagcgacaatatcaccgtattggcgccgagccccatgacgagcatcagcaccgcaagcatcgcaagcgccggcacggtctgaatcacgtttgtcaccgcgaatacccagccgcttaatgttctgtacctggcaatgaagatgccgagcggaacccccacgatcgccgcaaataaaacgccgtataccgacatgagaaaatggcggtaaaactcctgaagcacataggcgccgttttgagaataataagtgccgagctgctgcagcacttccatttgccccacctcatttcttattcaaaataatgatgtttctccaaaaattctttagcgacgacggacggttctttcagcttgccgtccacctcgtaattcaattcctgcatcgtttccgtatcgattttgccgatcagtttattcacaatgcccttcagttcaggatgctgcttcagcacgctgtcgggaatgaccggcgaacagtcatacggcgggaaaaactgcttgtcgtcttttaaaattttcagatcgtacgccttgatccgtccgtccgttgaataggcgaggacggcgtccattttcccgtttttcacggcatcgtatacaagtccgatctgcatcggataggttgtgccgaattcaaagccgtacgtgtcggtaaagcctttatagccgtcaccttttcttttcagccacgcattgtctacaccgagcttaaattgatccgcatgcttcttaatatcggacactttgtctaaatggtctttttccgcaagctctttcgtgacggtaaaagcgtatgtgttctcaaatccgtaagaatcaaaccatttgtaatggaagcgtttctcaaattctttctgtacgatggataatgcttttttcgggtctttttccgcttccatgccgagagtgctcgttaaatccgttcccgagtagcgcgtcgcggcgatatcgatttcaccgccgagcatcgcctgctgctggacatagttcgatccgaggtttttaattaatgccgtattcaagtctgtattgtgttcaatcatctgtgcgagcatattggcgataatttctgattccgtcatgctttgcgccccgattttgatcgtatcatcggaagccccgctcaggccgggaagggaacagccgcctagaagcagagcagctgacagcgccagtgcgcacatccatctcttttggtttcttttcacaacagccaactccttatgatacttccttcagtcctttcagccctttcggcgtcaccttccgttccgtcgtcgccagcagataatcaatgataatggctaaaatggtgaccggcacggcgccgccgataatatattcaggctgatagagattcaggccgataaaaatatagtctccgagcccgccgcccccgataaaggaagcaagcgtcgcccagccgatcagataaatggtggatgtgcggatgcccgccatgatcaccggaaccgcaagcggcagttccacaagcctgatctgctcccagaccgtcatgccgatgccttttcccgattccagcagatttttgtttacgccttgaatgccggtatacgtgttccggagaatcggcagcaccgaatagaaaaacagcgcgacgatcgcgggcacctttcccacgcctaacagcgggataaaaaacgccagtatcgcgagactcggcaaggtctgcacaatgttgacggcgccgatgacggcgcctgcgccctttttcattctcgtcagcgccactccgagcggaacggcgacgacaatgcctaatatgacggcgataatcgaaatgtataaatgctcccacgttttatataaaagttctccgccgttcgtctgcaaaaacttgatcatttcattcattgtaagcgttcctcccttgtcagcctgtcaccagctggtcttcctcgccccagattgaatcgtaaacgatgtcgacaaggctcgctctcgtgacaattccgactaaatgcctttgttcatcaacgacgggtacatatttcattccgcgctttaaaattttgcgtacggtatcgcgcagcagtgtcccctgctcgaccgtatacagatcagagcggagcacgtcgccgacgaggctcgcttttttccggttctgatcaatgatttcgacatcaacatatccttgcagcacattcaggtcatcaacgacaagcagggaatcgacacggtgttcccgcatcacctggatcgcctgcgaaagcgttttgtccgccgtaacggtcacgggctttttgttcatcatctgctcgacgcgttcaatatccggtcttgattgcaataaccgttctttgccgataaattcttcgacaaactcattagccggattcctgaggatgtcatcaggagtgccggcctgaacgatctctcccgcttttaaaatgacgatccggtcagccagcttaatggcttcatccatatcgtgggttacaaacacaatcgttttattcaatgttctttgcagttttttgaattcttcctgaagggaatcccgcgtaatcgggtcaagcgctccgaacggttcatccatgagaataaggggaggttccgctgcaagggcgcgcagcacgccgattctctgctgctgtcccccgctcagctcgtgaggatagcggtctaaatattccgggcccatatcgacgagcttcaaaagctcccgcgcccgttccttccgcttttgttccggccatttcagcagtttcggcacgagggaaatgttctgctgaatggtcatatgagggaaaagtccgatctgctgaatgacgtagccgattttccgtctcagctccaccgggtcctgctccataatgttttcgccatcgataaaaatctttccggatgacggctcaatcagtctgttaatcattttcatcgtcgtcgtttttccgcagccgctcggcccgataaaacaaataaactcgcctttttcgatatttaaatcaatgctgttgacagctttttttccgcctttatagactttcgatacattttctaatctcagcaatccgcgcacctccgaagggttccgttatttttctgaaaagtataatctttattataagatgaaatttgtaaaataaaaagtttacaatgtgttgaaattatatacaatatacgtattttttcatgttatcccgctgacaatgcggatgttcttacaatcgctcccgatagctcgcatatcctgccgcatcatctttttcatcaactgtaaaaaatatgatatattgtcagcatgaaaagccagtgaagggatgatcagccgtggaaaaaaacgctcttgatatcatcgggcatgctgaagagcatctcattgagagaatcgccgagaatatgcatacattcggaatgccggccacactgggacgtgtgctcggtattatttatatgaaccgcaagccgatgacgttaaatgagctgtcagaggcgaccgggatgagcaaaacgaggatgagccaggtggtccgcgaaatgaccgatgccaatctggctgaaaaagtgtttgaaaaaggcgttcggaaagacctttacgacgtcgagcgtgattattaccagacgtttatctccctgtttacggcaaattggacaaaggcggtcagcaaaaacaaaatgctctataaaaagctgaaccgcgagctgactgagcttctggaatcggaaaatctcagtcccgatattgaagaaaaagcccgtcagcttttggatgaactgacggattggctccattattatgactggctgagccgtttgatagaattttttgagagtgaagaagtgtttcagcatgtgccgaaaatagaaaaaagcagcacccgaagataaccgggcgctgcttttttaagtcaggaaaccaatatcgggaacatgcctttcagaccggcgccgatcatgccgatcgccaccaccgccaaaatcagccccatcagtcgggtaatgacgttcatttcggttttcccgagcttattgctgatgaaagaagaatagtgaaagaagatgaacgtcatcgcgatgacggccgcaatgccaataagcacgctgatgtaatggatgatgccgccatggccggccgacagactcatcaccgtcgcgatcgtaccgggtccggcgataatcggaatcgacaaaggtgtcacagatatatcagctttctccttgctctcccctttctcttcatgatggagagactgtacatgagatttcttcgcgttcagaagattataagcgatgccgaaaataaaaatgccgcccgcgatacgtaaggcatgaatgttaatgtcaaacagtttaaagatcagatggccgaagattaaaaaagccgccaagatgataaacgacagcacggaagccttgcgcgcgatcgctgtccgttctttctccgggtacccttccgtcagtgaaagaaaaatcggcacgtttccgatgggattggagactgcaaacagtgaaatgaagacatgaatgatgaatgaaaacatgcgtacctccttatgacttgccgttattgagttatgttttgttctccgctgtttcttatgcatggtttttaccccggggtctgctttttataacctcgccggacgatccggaaacagaaaaaaccgtccttgtaaggacggttttttctgtttgctatctccataagccttttccgaatttcaacagccgataaagcattttcaatttttttagcatgcgttaatttcctttttcactctgaatcaatgcgccgagagacatgatatctatcagctccaataaaattctaccataaagggtactttttctctattatcaattcatagagaaggggatttgtatatctttagaaaactccgttacatccgtcctattttcttttataatgtaaatattgaacaaaatccctatattacttgtaaaaggagttttagaatgtattgttctcaatgcggccatcatactgatggcggaaagttttgtgaaaagtgcggggcgccccagcccgggcagggaggcgcaggccaaacgcaaggccaggccgctcaggccggcgccgcggctaagcaggcttcaaagcaatttgccttattcgtgcttgatgtgttaaagcgaccgtaccaaacatgtaaaacgacaggcggcgaacagcttgtcagcagcatcatcaacatggtgcttttctgcctggtgacgccggttatgttttatattctcttatcagacggctttcgtgacgtcagttttaccgcggttgtgatcaaaccggcgcttacctttgcattatgcgttttttgcctgtatctcttgatttttatcgctttgaaggccggcggcgcccaggtgtcatttaaagattcgctgtccagattcggggcatttttgattccgtttacagctattttgcttcttgcacttatttttatgctgcttcatacaaccgtttgcttcaccattctggctgtcggtcttttaggagcggcgtttgccgtgcctccgctcatgctggcgagctatcagcatcagctcactactaaggcggatatcatttattctgttatcgtcatctatttgatcatttgcgtaacatttcaattcacgatcaagcattatataaaagaactcatgaattatttcttcttttaaaaacggaaacccccgccgcctgattggcgcggggttttttttattgaatggatattaaataaattcttccgtctttaacaacgccgccatacgtccaattgtatgttctgagcttcggactgccgccggctttcgtaatataaaactcctcgtacgtgtgaatcgtcagatgatagcctttctgtgaaaagcttttgacattcacttcattaaatacttcggtcgtcccctcgctgtgcagttttttgaccagtttctgctgatcagcatacaaagggcttccctcttctaaattacccgccatgatggcaaaattgttaaggctgacggcgcttgattgatttgtcaggtaatcagtcataaacgatgtgacttgctcgtttgtcacgctgcctgaagctgtatttcctttggatgatgcccatgcggatatataggttttcggctggtcgttttttattttttttacatttgtcccagaagaatctgaggcagggtcagctttttcgaaaacccattttttatgttttgtattatatgagagtacatagtgaaagctcggctcagcctcttccatatcaggcttcgtattcccgtcgaaataagcagactcatgaagctctttacccgtaacagttacttgccagcggccgttctcttgagaaatcgcaaatgaatccagatcaaagcttgtctctttatactgatccttcaaaaaggtgccggaactcttcatgccggataccacttctttcgtctgctctttccaggcggaaccagcctcggtcatctgatcggtatttccgtctgccatcgcttttgtatactgcttcgttgttttgacaatcgtgtccatgattgtttgttgtgtatcttgatccgggataagcgttaattccatatcagtaccgttgatcggaacatcggcagttttcatttttccccaaggaaaatcagcctccacggcggctgtcatggaaccgtcagttaagagcggaccgtatgtaacggatgtaaacggatctttatggacggacttgccgtttatcagcagatcgcctttcgcgcttttgaagctgtctgccggagtgaacgtcacatcctcggcgtctaacggcaggtcaaactcaacattccggctgccggccgcctctgcctcttgctttttgacaacgtcaaccgtctcatttttaagcttggcttccgccgtgtagacaccgggtgcatacgggccgaagatttgggtttcatcggcttttttgaccgtacctgttttctcgctgttgatataaagatcggcgcctttataattgctggtgacgcggaaataaaccggatcgactttcagttcgtaatggtcaaacaaaagaagggtttttccctcttttttgacgtataccgcatctttttctgatgacttgccgcgaagcgctgccagcagttcatcgtgtttctttgcgtatgcaaggagcggtttgacattggtctcattcagcttcagttttttgtctgaaggagtgagcagggctgcgagctttttcgtgtccccgtcatgaaccgcctgttcgaattgatccgtgagccttttttcagatgtcagccaggctccggttttatatgcggcaatcaataagatcagcgctgcggcaatgccgccccacatgaagagcgtttttttagggatcggctttctcatttgtgaagcaggttcagccgcttttacagccgcctgccgctccagccggcttcctttcccgatcggttttccgcattctttacagaaatgcgcttcttcattgttctgctggccgcaatgcttacaaaaaaacatgactttcctcctattcaatctgcaaaacttgtataacttttcctatgtttcatattttataataaagtagaatgattttggagttattttcaaaaatagctgtcgatcataacaaaggaggggaaacggacatgcaaaaactgagcatccgaaaagccgcggagccggatgaagcgctgtatgaactattgctgctggccgatccgtcgaaagagattgtcgatgattatcttgtaagaggagaatgctatacggcctggacgtcagacgagcttgcaggggtttacgttttattgcaaacaaggcctaaaacgatagaaatcgtaaacatcgcggtaaaagaatcgctgcagaacaggggattcggaaaacagctggtgcgggatgccattgaaaaagcgagacaatcgggggctgacacgattgaaatcggcaccggaaattccagtattcatcagctgtcactctatcaaaaatgcggattccgcattcaggctgtcgaccatgatttttttatcagacattatgatgaagacatttttgaaaacggcattcaatgccgggatatgatacggctttatttggatttatgataaaaagggcgccggctgacatcggcgccccttcgtttaccattcagacggattgatccgcttgtttctctgtatttctttgactcccttgtctgactgaaaaaatagcaaaaacgatcgtaagggtcagtccgaccgccgcaaaaatataatccgcattcatcaacagcagaagccctgtgtagacagcggccgacagcggttcacccattttgacaatggaaaaaatcagtgcaaagacccttccgaaatatgcggccggaaccgtcttttggaaatacagcaccgtttgcacatcaatatacgagatgatgatgccaagcaccaggaagatgatgcactcaaacccatgaaggggaaaaaacaggagcataatgagcagtcccgctgccgttaacgtccgcgggtacagccggttcaagcgttttgtattccatttgaaaaatacggccagattgcccaaaagcatccccgcctgaaacatagaatacatgacggcaaaccatacagaatagttctgctgaaaacgctccacagcaagaatcggccccattactgaaataaggccggcaatgacgagatttacgacgaaaaagtatccgaccgatgtcagccatgccgcatttcctttcagcattctgtaaccggcttttacatcttcagttccgttgcttttttcattgggctgttctgaaatacgaataaacgcgataaatgccgcggagatcaaaaaagcagttccgtttatggcaaacagcatcccgaacggaatagccgcaatcatgatcccgctgatcaattttccgacgatgagtccgatcaagtcactcgtattgatcagagatgtcgcctgatcaagatgctgtttgcggacgagcagcggaatgatcgcgactttcgccggcgcaaacagcatcgattgcagagatagacaaaaggcgcacaccccggctatccatacggttaataaatcgttcgcgctgagcaccgccaagaggatcataataacggcccgacccgtattgcacaaatacaagatcgacttttttcggaataaatcaatcagcggccccgccagcacgccaaatgtcaacggcacgagttcgataaaagaaataacgccgactagaattttgctgccggtcaattctaacactaacagcggcaaagcaatgagccagaccccatccgctgctgaagaaaacacctgtgcacaccaaagctttgcatagttcggtgttcgatatgtcatatcaggcccttttttgatcctcgtcatcagaaacaccgccgaaccattccagcgttctccatgattcccgtctttccgtataatcctcttccatcacctcaaatacaatgccggtatcttgattccgataaagctcctgcaaagtatctgcagcccgtctcagcagctcctcagcgatcgtcccttcactcggatggcggccctcaaaacagcggacgccgccatgcgggaacgcaagctggcgaaatgagctgaagtgataatgcttaatgctctcttttatcgacagaaactgaaagaaatcgggatatttcagctgatcatttctgaacataagggcagatgacaagtgagtctgataggtaatcgcccaatggcacagatcccacgtaataccgacatgcttcagatccatctgcaccagctctgtaaaatcctcaggataaatgaaaatcggatcaaaatcctctcccagattcccgatgatcggaaggttttccacaccgatccagatgtccgtccctttcagccgctcatcaaactccgcgaaaaactcaacgatttttttacggtttccttccaggtcatagacttgaaattcctcaaccgtcataaattgattcgcatgaacggttatgcctttggcgccgtatttcacagcgagctccgcaaagtgataaagctgttttttgatgtgatcttcattcacataatcggcatgatctgtcgggaaatgcagcgtcaataatgaaggatcaagctgttttgcatattccagcgtctgattaaatgttttgatataatccgcttcctcaaaggaatggccgtcaaaaatattcgcttccagaccgtatcccgcttccacccatttctcatcgatttgcttcggatcaagtccgaaaaacggaatttgagcaatcataggacagtcaccatgttcctctcacaagcataaacgcttccgcagcggtaaaacccgattttgctccccacacatgggcattatgttcgatcgcctgcaaagagcggggatgagggaagtctctgagctcggagccgtaacacgccatcgatttcaatttcgtttcaagctcgtcttcaatattaacgaagaaattggcatgaaactgatccttctgacagtaattccattccgtcgaagacaatgtttcataggcaaaaacccgttttaccgtatgaccgggaagcggacgggttgccgtcatgaccgctctgaatacgacggagtggtcaatattaatgtcaccgccgtactgggtatacacaatgtcaggctgaaaacgattgatttgtttctccgcttccttcacgacatccagcaaatccattgaatccattctgttatcaggaaggttcagcctgacaaaatcatggatgcccaaagtgctgagcgcctgctccgtttcttgattagaatgctccataacggaatcttcaggctttttgtaatccgtttttcttgatgatttgccttccgccataatgactgccgacacgctgtcaccttggcggacatgtttggcgagcgtgccgccgacgccgataatttcatcgtcgggatgcgctgcaaataccattactttcatcatattgccctcctttaactaacatttcagctgtatccgctccgcagttcatcagcatatcgagcatggagaggtgagggatatgctccccgaataattgaggatagccaaaatgccggatctgctgatactcaatgacaattccgtttctttcaaaatcgctttctattaaatagtcggaaccctgactgcctgaataataacggtccgcccccagctcctgacaaagcgctaaaacaaaatcgctttttttctccttccggcattcaagctcagagacataacagagcggcgtttcaattcggagctcttttcggaaaaattcaatgatgtgcatattcaaatcatggagatattcccactcccgctgatagacatcttgaaaaaaatgctggtatcgctcaaaatagggagctttcgcatagttcattttaatcgccatccaatgttttttccgccaatcctgtgtctggtcgattttcatatgccgaagctctatgtctttatattgtttcatctgcaaaggcactgtcagccatctggggccttgcggcgttttgattctgttgcggttgagaaatccttttttctcaaattgagctgtgtcatgaatggcaaacagatccgacttatacattttttcaaaaaaaccgtaccacggcagataactggattgatggccgcttattgttttcattccggtttcgtaaaaagtcggcattgtttttcttcagctccccaatatcgtttcggtcttgcgatttctttactgtgtgaatagccaaaatcagcccattgaagcttgcggcaaatggcgaattgcagggcgtcacgcatcaataagtaagaggcctgcgctttttttcccgccaggctgtttacattctgccaataatagaaatgagagcggtcatagagaaaaatactgctgctgatcagcgtctcatcctgatatgctccgatccaaaacatccggtccgcaaacgtgtcaagcagcttttggaaaaagccctggctcagcacataagccgcgccgattgccgccgtatgctctttgtagaggtcataaaacgcgccaagttcttttcgcccgatcagccgggtgacaatattctctttttcagcgtatctgactgccgtccgggcttttccggaaatgcccgtccaaagctcgtcaaacgtgtccggaagcgatagaatccgcgttgccttttccgtccatccttccctgatttcttctgtaaaagaagtctgaccgtacggcagcagcatccgggatatgttccggccgaatatggcctggatttcactttgaagccattcaaatgagatggggcgatctgaaataacgccgccgtatccgatcatattgccggataatacgcccttctgttcaaaaagcggaagatagatgacttgtcctccgtccgttgtcagtctgacagggtgaaatgacgtgccgggaagctcttccatgaggattccccaatcatagctttgaaacaatcccgcctgatacatgtcagcggcccgatcccatgcctggcgggtcgtgcatactgctgttttttgcatagttatcaccactattcagtcttattctgttgctcacaatatgataaaacggattcggctatatatctgacttgctccttttgaagaggaggtttaaacggcagggaaagaactctcttccaaagcgggtcttccccgccttcccccgcgtatgtttcataaatcggaatacgtccgaggggaaggtagttccagcatgtttggatgcctctttcagctaaataaacggaacacccgtaccgctcttcatcccggggaaatacaattgttaaataattcagatgttctccttcttggggctggatcattcttatgccgtttgtttcttccgcctttgcaaagatttctcccgccgtctctaagtttcgaagcgaagctgttacaagctgatccatacgtgaaagctgatcatcaataatggcttcccttgccggatgcatgcgaagcacgggtacaacagccggtttatccggcagagcttcgagctttgtggctttcatggaaggcatggcgcccgcttttctaaacatatatgaaataggatgatgccgtttccgtttcattacagcttggattctttgatttctgatatagattcgatagtcagctgccacttggctgcgctgttccatcgggagatttgctttttgccgaagccattctttcggcgcgattaacgcgccgcctccgatactcgcaagcggctttgaggggccgaagcttaaaatgccgaaatcgcccaaaccgccggcaaatgtatccgcttgttttgtaaacatggcttgagcggcatcatcaatgacagcaattccgttttccttcgcccagtcaatgatggcggtattttctctccggccgtatacatgtgtgaggataaccgcacacgtctgccttgtcactttttttttgacatcctcaaaagataaggatagatgctcatccagctgtgcaaacacaggcgtcgcaccggattgcagcacggcatcaatgacattcgggcagctgaaggatgagaaaatcacttctttccccggcccggcccccgaataagttaatgcgagcaccagtgccgcactgccgctggaggtcagcacaaccccttttccgtaacgtttttccagtttttcagtcagtccgctttgtccggcagtaagcaagtgtttcactgcgcgcagacggccgctgacggaaaactgtccgggataaacgggatatttgaccacttccgggtttttaggaaagtgaaagtttgtgcttttgtctttcatcttttatgatctccaggccttcattcagacttactttcggagcgtaaccgagcaaacgtttcgccttctcgattgacggcgcccgcttaaaaatttcgatgtcttttcccctcacgccgtcttcgcccagctttttaaacagatagttatccttctctctgcctgagagcacattgactttttcagccagttcttttatcgtgatcggctggtcgttcccgatattgaagtcctcaaagacggctccttcatgaatgagagcgagataagttccggtgacgatatcactgatgtagctgaagcagcgtatttgtccgccgtccccgtaaagaggcagctcagagccattctcggccaggctgaaaaacttgttgatgacaaaatcctcgcgctgtttcggcccgtatacattaaagtaccggacgacccgaatatgaagttcgtcggaagcctgttctctcaaatattcctctgattgcagtttggcttttccgtaagctgatttcggaagctttctgcttgtctcggtataaggaaaatccggtgaatctccgaacacttctgaactcgatgagaaaagaagtgtgctgattcccaattcaccgcatacctcagtgacattttttgttccttcaaaattgacccgtatgacgtcttcttcattgcttcggcagctgtccactccgaccattgccgccaaatggacaaccgcatccgctccccgcagtgattcgcggagggacgtccggtcaaggatatccgtttggcggtattcagtgtcaaaagccggcttcttttggtctgcaatgatggtgtgataacctttagcctgtaataatgccgccagttcgcttccgataaaaccggctcctccgataatcgcaatatgtttcatgatcctacctcctggctgatagtcaaaacttcttttatagacttgacaatatagctgcaatcctcatctgataactggctgtaaagaggcagtgacacgatctcccggaaaacacgttcagttaccggaagctccgcaggaaaatgttttttatagtaaggatgcaaatgcacgggaataaagtgcacgctcagcccgatttgtttttctttcattttctcaataaacagatctctgtccataccgccgttttctcgaatccgcaaaataaataaatgccatgagtgcgttatgccgcttggaatgtcagaaagcggaagcgccgctttatcagattgacctgacagttcacgtacataaaattgagcaatctgttcccgtttttcttgaatttcgtttgcgcgtttcaattgaaccagaccgagcgcggcctgaatatccgtcatattatatttgaaccccggcagtaaaacgtcgtatctccagctgcctttttcaccgtaccggttccaggcattttttgtgatgccgtgccagccgtacagcctcgctctttctgcggcctgttcgtctttcatgacgagggctccgccttcccctgttgtaatatttttggtggcataaaagctgaagcacacggcatcgccgtgagtgccgatcatgcttccgttatattttgtaccgagcgcatgagcggcgtcttcaatcagatacaatccgttttctttacaaatggattgcaagttttccagatcagccggatagccggcaaaatgaaccgcaattaccgcttttgtgcgcggcgttattttcttcctgacatcttcaggatcggcacatagacttttctcgcatatatccgcaaacaccggaacggctccggcgtgcaggatgacattgacgctggaacagaacgtgaagctcggcacgatgacttcatcgccttctcccacaccgagcgccaataaagccatatgtaatgcagcggtgcctgaattacagctgatgacgtgttcggctcctatacattctcccagctttttttcaaaatcgattaccttcgggcctttcgaaatccagcccgattgaatcgtttcggttacgcttgcgatttcttcgtttgtcatatcaggtctgtgaaaagagataaatcgattactaatgaccgttccctcctataaagtgacaactctgcaattgtcggctgatttttccttgcatacatttcttgtgtcaaagataatcggtgaggcatccttcaaaatactgtagtcgatgacatcgtgatctgtatgaatgatgatgacgttgtactgattgatttgttcttttgtgaaagggacagattgtttgcagcttccgtcattcaagcggatctcgctgataaacggatcatgataatcaatcgcgcatcccttgtccatcaattcttccattatcgtaaacactgaggattcacgcgggtcatttgtattttttttataagcggcccctattattaagatgctgcatttgtctttgcccgccagtttcaaagcatagtcagagacagaaatcggcatgttggaattgatttcgtccgcgagatcaattaattttgtctgcagccctttttcattcgcgatccatttgaagtaaaaaggatcaatcgggatacaatggcctccgactccggggcccgggataaatttttgaaagccgaacggcttcgtgtccgccgcgcagatgacttcccatatatcaatatcaagttcacggcaattaagcgccatttcattgataagagctatattgacataacgataagtattctctaggagtttagctgtttcagctacttcgggtgaggtgaccgggtgaatgcttgtaacaatggtgctgtaaaacgctgaggcaagttctgtgcaagtctgtgtggttccgccgactactttaggaatatctgaaacttcatattgcctgttgcccggatcgattctttccggagaataagccgtaaaaaagtctgttcctattttcatgccgcggcttgctgccattctgtcggcaatcttttttttcgttgttccgggataggtggtgctttctaaaattaaaagctgatgctgccttccataagcgatcatgctgtcaactgcactgtcgatgtaggttaaatcggggatcttgtcttttttgttcaggggtgtcggcacacatatcacaatgatgtcgcatttttggatgagcgacatgtcggcgctgatttgaaagcgttttgtttgtaaagccgagttcagtctgtcgtcctctatatcttgaatatggctgcttccggcggctaacaaggaaaccttttcactgtttttgtcgaatccgataacattgtatcctttatcgacacattccagcgcaagagggaatcccacatatcccatgcctaacacgcctacaatcgcctgcttcgtttcaatcagatgtaacagccgtttttgaccaaggttgctggcttcttttgtgacagtattcatttttcgccccctaatagatagaaaagagtattgttttttacaatttaaaacaaatatcgatcgatatcgcaattataacaaaagttaaaatttgataaatgagttttacatccttttataaattaggtattatctatttatttttcttttatttgtaaaataaaatcctgtcaaatggtatatatctggtaacgagtgagaaaatctccctcaattgagagaatatacagaaaacaatataaaaaaacaggccgaagcctgtttttttattctttcactgcctcagttacagccgcagaaacgagtgatcccgctttctctaatcgttctttgctgatgtgtttcatattatcattctcggtgtgataccaaggccccggctcctgtgtatcggggctgagccaaatccagttagccgacggaatccctgcttcataaaaagagacatggtctgagtaaccgagctgaatcaggtttggcttgaccaagcgggatttttcagcggctttttcagcataccggacgctcgggttttccttgccgtcaggagtcgtgacacacatttgactcgcttcttcccagtcagtcgcaatcatatcggcattaaaattggcctggctgtgctttctttcattgttcgtgagtgtactgacgtaataagatgaacccgcagaccataattcttctgcaccgaacaggataaagcggatctctttgtctttcggtatgtgtttgagttgcttgctgatttccagaacggcagatgtgcctgaggcgttgtcatccgctccgggtgcgccttttacgctgtcataatgcgctgtgacataaataatatcagcatcagaagagttggcctgtgctgctttgcgcgttcctataatattttgtgaggtgcggtttttatagtttttaaattgaatgactgcctgcttttccttcagcaatgcttcaccgtcttcttttttcatacccgccgccggtattgtgattcctttatcggtatgcggacggacggcgagcggttttgttgtctgattataaataatgactgctttggctcccgcttgttcggcatgtttgatcttttgagaaacggggatctttccttcgcgtatcactgcaatctttcctttggctcctgttacgtcatcgcgtgatccgcagccgccgtcaaaaatccctccctcaattctcagctctttttcaacagcggattgatcagcggagcggagcggaaattcatgatctcccgctgtgactgaacctgaaaagtactttttcaatggaaatgactgtactttgacactggcgccctgagcccgcaggcgattcgatatgtattcagccgctttcttttctttcgcagttccggtttcccgcggtccgatggtttcactcagatcatgcatcgtgtccaatgcctcatcagcatcaaaaaccggcgcggtcacggctgaataagcatgagtttcggacagcggcccggcagacgcgccccatatgacgcttgctgccaccgcggctgacataaatgaaaatttcatcataatccctcctcttattaacacctcttccctttcgattgaagaacactgattcctttaaaaaggggaaaaatgaatattattgaccaaatgaagatgatgaaaaaggagggaaaagcccgggagcataaaaaaacgccgggagaatatctcccggcgtccattccattacttattcaagttatagaaagagttgataccgtggtattgagcagtttcagccaactgatcttcgatgcgaagaagctggttgtatttcgcaacacggtccgtacgggacggagcacctgttttgatttgtcctgcattagttgccacagcgatgtcagcgattgtgctgtcttcagtttcacctgaacggtgagagataacggcagtgtagcccgcgcgtttcgccatttcgatcgcatcgaatgtttcagtcaatgtaccgatttggtttactttgatcaggatagagttgcctacgccgtttttgataccttcagcaagctttttcgtgtttgtaacgaaaaggtcgtcaccgacaagctgaacttttttgccaagacgctctgtaagaagtttgtggccttcccagtcgttctcgtcaagtccgtcttcgatagagatgattgggtatttagaaaccatttcttcgtaccagtcaaccatttcagcagatgttttcacaacgccttcgccagacagatggtatttgccgtcttctttgttgtagaactcagaagatgcagcatccatcgcaagtttcacttcttcgccaggtttgaagccggctttttcgatcgcttcaacgattgtttgaagcgcttcttcgttagaaccaaggttcggagcgaatccgccttcgtcacctacagctgtgttcattcctttagcagaaagaactgatttcaggctgtggaagatttgagcgcccatgcgaagcgcttcacggaagttaggcgcgcctacaggcatgatcatgaattcttgaatgtctacgttgttgtcagcatgctctccgccgtttacgatgttcatcatcggtacaggaagcgtttttgagttgaatcctccaaggtattggtaaagaggaatctgtaagaaatcagcagctgcgcgcgcacaagccatagatacgccaaggattgcgttcgcaccgagtttgcctttgttttcagttccgtcaagctcgattaaaagctgatcgatagcgttttgttcagttacgtcaaagccgagaagctctggagaaatgatttcgtttacgttgttaacagcagttaacacgccttttccaaggtaacggtctttgtcgccgtcacgaagctcaaccgcttcgtattcacctgtagaagctccgcttggcactaatgcgcggccgaaagctcctgtttctgtatatacttcaacttcaactgttgggttgccgcgggagtcaaggacttcgcgtgcataaacatcaacaatgtatggcatgagtttgtctctccttttgatttacgcttatttttgaattaaagatgttccggtcatttctttcggtttttcaacaccgagaaggtctaataacgttggtgcgaggtcgcctaggattccgccttcgcgcagcgtcacgccttctttcgtcacaatgacagggactgggtttgtcgtatgggcagtgtgcggttcgcctgtttctgtaatcagaatgtccgcattaccgtgatcagcggtaatgatggcatgtccgcctttagcgatgatggcgtcaaccacttcgcctaagcattcgtccactgcttcaattgctttaatcgtcggttcgaccattccggagtggccgaccatgtcagggtttgcaaagttcaggatgatcgcgtcgtgcttgtcagccgcgatttcttttacaagagcatccttcacttcatacgcgctcatttcaggcttcaggtcatatgtcgcgaccttcggcgagttaatgaggatgcgctcttcgcccgggaattcttcttcgcggccgccgctcataaagaacgtaacgtgcggatacttttcagtttctgcaatgcgaagctgttttaacccgtgctgtgccaatacttcaccgaccgtattgtcaaggtttaccggtttaaaagccacatatccgtcaacagattcactgaagtgagtcaggcagacgaaatacaggtttttcggatgattttcaccgcggtcgaaatcgcggaaatctttgttggtaaacgtgtttgaaatctggatggcgcggtctggtctgaaattatagaaaatcacagaatcgccgtcatgaattttcgcaacgggttcaccgttttcttttgtgatgacggacggaatgacgaattcatcatgaatgccgttcgcatatgaatcgtcgactacatccatcgcgctgcggtaagacgggccttcgccgtaagccattgcgcggtacgctttttccacacggtcccagcgtttgtcgcggtccatggagtagtagcgtccggaaatgctggcgatttcaccgacaccgatttcttcgatctgctcattcagctgctgaatgtaagttttcgctgtttgcggacctacatcgcggccgtcgaggaaaccgtgaatatacaccttcgtcagtccttcacttttcgcaagcttcagcagcgcgaataaatgattgatatgactgtgtacgcctccgtcagaaagaaggccgaacaggtgaagcgctttgtcgttgtctttcgcgtttttgatagcgtcaaggaacgtttgattgcgttcgaattcgccttcgcggatggcaacgttcacgcgtgttaagctttggtacacaatacgtcctgcgccgatattcaaatgaccgacttcagagttccccatctgtccttcaggcagtccgactgcttcgcctgatgccgtcagcgtctgatgagggtattggttccaataacggtcgaaattcggttttttcgcttgtgcgactgcgtttccgactgtttcattgcgtaatccgaacccatcaagaatgatgagtgcagctggttttttactcatattgaccttcctccaataattgaacgaatgactgcggttcaaggcttgcgccgccgaccaaagcaccgtcaatatcggactctgccatatattctttaatatttgcaggttttacgctgccgccgtattgaatgcggagcttgtcagcagtttcctggctgaagctttcagcaacgactttacggatatgcgcgcagacgtcgttagcatctttcgctgtagaagatttgcctgttccgattgcccagattggctcgtacgcaataacggaagcggcaacttgctcttcagaaagacccgcaagaccttttttcacttgatcggcaacaagatcatttgtttttccggcttcgcgctcttcaagcgtttcacctacgcaaatgatcggcacaatgccgtgtttgaaagcggcatgcgcttttttgttaactgtttcatcagtttcagcgaacatttcacggcgctcagagtggccgatgacgcagtaatccacgccaaggtctttcagagcgaccgggctgatttcacctgtgaacgcaccgttttcttcaaaatgcatgttttgggcgccgactttcaggtcagttcctttaacagcagaagtcagcttttctaagaaaagagctggtgcgcaaacaacggcttccgctttgtctgctgctggaatggaagatttcacttcttcaacgaagctgacagcctcgccgagtgttttgttcattttccagttaccggctataattggttttctcatctgttccacttccttatagcagtttttatttatcgttcagcgcagctacacctggaagctctttgccttccatgaattcaagggatgcgccgccgcctgttgagatatggctcattttgtcagcaaggccgaatttttcaacggctgccgcagagtctcctccgccgatgacagagtatgtatcgtttgcctctgccaatgcttcagccactgcttttgtgccttgagcgaacaagtcgatttcgaatacgcccatcggtccgttccatacgacaagtttgctgtttttgataacttcagcgtacgtttcgcgggttttcgttccgatgtcgatcgcttctaaatcacttgggatctcagagatcggcacgatttggacgtttgcatcgttagagaaatcatcagcaacgagaacgtcttccggcatatagaatttaacgcctttttctttcgcgcggtccatgaatgattttgcaagttcgattttatcttcttcaagaagagatttaccgacttcataaccaagcgcttttacgaatgtgtaagcaagacctccgccgatgatcaagttgtccactttatcaagcagactttcgattacgccgattttgtcttttactttcgcgccgccgatgattgccgtaaacgggcgctcaggatttgtcacggctttgccgagaacgtcaagctctttttccatcaggaatcctgcaaccgccggcagatgctcggcaattccggctgtagatgcgtgagcacggtgggcagcaccgaatgcgtcattgacatatacatccgcaagctcagcaaatgctttagcaagctcaggatcgtttttctcttcaccagggtagaaacgtacgttttccaatacaagaacgtctccgtccttcatatcagaaatttgtgcttttacagcatcgccgtaagcttcatccgcttttttcacttctttgccgagcagttcgcctaagcgtgcagcgacaggagttaaacgaagctcctcaaccacttcgcctttcgggcggcctaagtggctcgcaagaaggactttcgcgccttggtctgcaaggtgtttgattgttggaagcgcagcgcggatacgagtatcgtctgttacttccccgtctttcattggaacgttaaagtcaacgcggcagaatacgactttgccttttacgtcgatgtcttttactgtttttttattcatgccttaggagatcctccttcaaaatggtttgcatagcacgaaaaacgtgaaacgtgaaaccgcctcatgatgcttccgccgcggggcagattgcagcttccgggcacggggcagatcgtcttctgagccagggcaggcggctcagaagacgaaagtgccgcggaaacttcaaaacgcggacgttctgcagcaatccggcgctttctgaaagccggttctcatggaaaaagggaaagggagtccgtccccttcccttgtccgctttcattatagcgtttctgtccgaaagaaccaagtccggccctttccgggagctatgaattaaagaccttgttttgcgatgtaagctgcaaggtcaacaacgcggttagagtagccgctttcgttatcgtaccaagagattacttttaccatgctgccttccataaccattgtagaaagagcatcgattgtagaagagttagcattgccgttgtagtctccggatactaatggctcttcgctgtagccaaggattcctttaagatcgccttcagccgcttctttaagagctgcgtttacgtcttcagccgttacgtctttgttaagttcagcaactaggtcaacaagagaaacgtttggagtcggcacacgcatagctccgccgttcagtttgcctttcagttcaggaagaacaagggaaactgctttagcagcaccagttgatgtaggaatgatgttttcagctgctgcacgcgcacgacggtagtctttgtgcggaagatcaagaatttgctgatcatttgtgtaagagtgaacagttgtcatcataccgcgtttgatgccgaatttgtcgttaagtacttttgcaaacggcgcaaggcagtttgttgtgcaagatgcgttagagataacatggtggttagccgcatcgtatttgtcttcgttaacacccataacgattgtgatatcttcttcgttagcaggtgcagagatgataacttttttcgcgcctgcttctaagtgtttcgcagcgtctgcgcgttttgtgaagaaaccagtagattcaactacgatttcaacgccttgtttgccccagctgagtttcgcaggatcgcgctcagcagaaacttcgattgttttgccgttaacaacaaggttgctgccgtcaactttaacttctgcatctaattttccgtgtacggaatcatattgtaaaagatgagcaagcatgttagcgtctgttaaatcgttaaccgctactacctcaacttcaggattgtttaatgctgcgcggaatacgttacgtccaatacgaccaaaaccgttaataccgacttttactgccatgattatttcctcctttaaataagtgagagatatttatattgagggactgttatcccttaataacttctttgcggctccttcgtccgtgacgagaaccgtgtttcgctgctttttaaaataagcttcgattgcttctgcttttgatgatccgcccgctaccgcgataatgtcgggaatggcatcgaggtcatcaagctgcattccgactgaatgcaccttgtgaacgacttctccgtccgcattaaagtagtagccgaatgcctctgtcaccgcatgattgtcatctattttcttcaaatcttccaaaggcgtgtttcttcgctccgccattgttctagcttcgccgattccgtgaacgagcatactcgctgatttaatcgtgtgaagcacctcttttacggaaggttcttcaataatagatgagtaggcgccttgtgacagctgtccgggaacgaacaaaagccgataagtgcctgaagccttttccgccatatgcgcgcatatggtgttcgcctggtttttcacatcttcgcctaaaccgcctcttgcgggcacaaacaggagctcgcggttttttgaatccggcgtcatcatatcggcgacggcttcaattgtcgtaccgccggttacagcgacgatatttttgcctgaaaatctctttttcatacatgcaacggccgctctccctaattcttttttgacccaaggagattggtcgctgtcaccggaaacgataatggcgtctttcagattaagccgctcttttaatgtcttttccaaaagcgtcaaccctaaaacatccttcatcgtatcttccagaatcgaaagcagtgaatagccctcttccgtcattgtcatgccgtttgttttaatatcgatgagattctgttctttcaaaaactgaacctcgcttctgagaacgcgctcggtcaatccgagactggctgcaagacttctgcggccgatcggttcggtaagcctgatatactgcaagatttcaaatcttttctgcatcacaagcaaaagatcaggcaataattttttttgagcttgtattaactggttcatgactcaaacgttccttcctattcatactggacagaaaatgtcccgctatgacaaaaaacgtcccatcatagccaaaaaaaattatgtctgctttctttaattattttaacaggatgacattgttaattcaactgttaaaggtcaattcctcgacattcttcgcaggattttccagtatctccttgatacagtcattatatacagaaacggaatgaaggtgacagacaaaagcccgccggagcggacttttgtcgtaaaacgctttcattttatccagagtttttctatttcttctaatgatttatttttcgtctcagggcagatcgtcacgacaaacaagaaacagagaatattaatgacggcgaatatccagaaggtgtacgcgagccctaacccgctgatcatcatcggcacgaactggccgatcgcccagttggccccccataagaatatcgtcgcaataccggcggcgcgtgcgcggaggtggttcggaaagatctccgaaatcatgatccacgtaatcggcccgactgatacgcagaaagcggcgacgaatcccaatatgatgacgactaaagccggaccgctcgccagctgaaaataaaaggatgccccgattaagatcatgaacagcgccataaaagcagatccgacccccatcagctttttccggcccaccttatcgactaaaagaaccgcgataatggtgaaaatcacttcaacgacaccgacgatgcatgtcgtgataaaccccgcattctgtccgaagcccatcattttgaaaatttccggcccgtaatacgtaattgcgttcatgccgataacctgattgaataaagccagcagaatcccgatcacaagcgcttttctcagccccggcttaaacagctgagacaatgaacccattttttctaattgtaaagacgtttcgatttgtttgatttcttctttcgcggtctgctcgccgttaatgcgcgtcagcacggcgagggcttcattccggcgccccgctttcgcaagccagcgcggactttccggcacgataagcagcacgataaaaaagatgacggacggaatcatgccgtaagcgagcatccaccgccagccggtgtgcactccccattcatacgagccggactgctggacggcaaggttaataaaataagtgccggatatccctaatatcgtaaacagctgatacagtgaagacagactgccgcgtatggccggcggagcggcttcggtaatatacgtgacagaaagcgaggagcccatgccgattcccagaccgccgatgactctggcgatcactaaggaagacacactttgagaaagcgcagagacaaccgctgacaccgcaaacaacagcgccgctgccatcaaaatctttctccgtccgaaacggtcactcaaaaatccggaaatcccgacgccgaaaacaccgccgatcataatgctcgaaatcacgagcccttccataaaaggacttaagcggtacaaatctttcaggaaaccgatggcgccggaaatcaccgccgtgtcataaccgtacaaaagccctcccagtccggctgcgcatgagatgagaatgacaaaccacttggaatgctgccgagtgacaggtacatttgagccaattggtgccgggtgattcttcatgaattttaccctcccgcgaataatagaataaaaacgcttacaaatctgagtgcggcgcttgatgttgctttgttttcttcagaaccgccacatttgtacgtacttataaagaattttatctaaaaataaggaaaattagtacgtacaaataaagaataagcagtttttcataatctgtcaattatttttacagcttgatgaaagggcttactatgttatactggaatttgtccgtatacattttggaggaattgatatgctaccgaaatatgctcaagtaaaagaagaaatttgttcatggctgaatcagggaaaaatacagccggacgaaaagctgcctacggaaaatgagctgatgcagcagttcggcgtcagccgccataccatcagaaaggcgatcggagatttggtctcgcaggggctgctgtacagcgttcagggcggaggcacctttgtcgcttcacgcacggcgaaatcagccatgcattcaaacaaaacgatcggcgtcattacaacgtacatatcagactatattttcccgagcatcatcaggggaatcgaatcttatttaagcgaacagggctattccatgctgctgacgagcaccaacaacaatacagaaagtgaacggcgcggtcttgaaaacctgctgtccaaaaatatagacgggctgattgtcgagcctacgaaaagcgcgctgcagacgcccaacatcggctactatctcaatctggagaaaaacggcattccgtttgccatgattaacgcctcttattcggagctggccgcaccaagcttttccgtcaatgatgtcaaaggcggcatgatggcttgcgaatacgtcatgtccctcggccacacgcacattatgggaatctttaaagcggatgacacgcagggcgtcaaacggatgaacggctatctgcaggcgcatcgggagcgcgggattttcccgtctccggacatgatcgtcacttacacgactgaagaaaaagaaaccgtgcttctccaaaaaattaagcatacccttgagcaaaacagcgaatcacacccgacggccattctttgctacaatgacgaaattgcgctgaagacgattaatcttctcagggaattcgggttaaaggtgcctgatgacgtatcggtcatgggctatgacgattcacatttcgcccagatttccgaggtgaagctcacctctgtcaagcatccgaaatccattatggggaaagcggcggcaaaatacgtcatcgactgcttagaacataaaaaaccgaagaaggacgacgtcgtgtatgaaccggaactcgtcatccggaattcagtcaagcggatcggcgaataaaaaaagcaatgtgcgcggcacattgctttttttgctcagctgttttttaattcggcgatgatttcaaatgatctcattctgtcggcatgctcaaagctttctgaattcaccatgatttcatccgcctgtgttgtccggatgaagctttccagcttttccttcacacgctccggtccgccgacgatcgttgaactgagctgttcattgaccatcgctttttcatacggcgaccagatttgatccatgtcttcaacaggaggcttcagctggttcggcgtgccgcggacgaggtctaaaaatctttgataatgcgatgttgccagatgctccgccttttcatccgtatcggcggcaatgacggtgacgccgaccatcgcgtacgggttatccagtacgtctgacggacggaaggagctgcggtacagctcaagggcgggcacggtgtttttcggtgagaagtgagccgcaaaggcgaacggaagcccgagctctcccgcaagacgcgcgctgaagccgcttgagcccagaagccagatcggcacgtccagcccttcgcccggaatggcgcggacttgattgcgcacattgcctgtcggtttgaagtaatttctcaattcttcaagctgttccggaaaatcttccccgctgtttatgtttcttcgtaaggctctcgccgttaattggtcggtccccggcgcgcgtccgagccccaggtcaatccgccccggatataacgtttcaagggttccgaattgctccgcgatcacaagtgaagaatgattcggcagcataatacccccagaaccgacgcggattttttttgtgccgccggcgatgtggccgatcagcactgacgttgccgagctggcaactccttctatattatgatgctccgccagccaatagcggttatagccccactcctcggcgcggcgcgctaaatccatgctgttgcggaacgattcagcaaccgttcccccctgtacgaccggcgataaattcaatacggaaaacgcagtatctttcaatgtatgttcagccatcgttttctcctttgcggtttagtgtaagcagatcttaaacaaggtctctaccacacaccttaccacagcttttcccgtgagttaaacaatttgattcgatgatcttcgaacaatcagtcagcggtcgtcactagtgaactctttatgaatgaatctattacattcagatatgatgagcttttcatcctataaaagtgaaaacctatcgttgaaagaacagacccaataatgttaagatatgtatgatattgaataggaaggaagtcatagtctatatgcgtaaaaaaatcttaatggcactcacaacagctttactggcagcaatcttctttacaggaaacaccgataaggcatatgccgcagacttttactccggcactcagcagcatttaaatgtaagcggatttaccgatgcctcctactacacgaaaaaagcgaaaagtgtcgattttactctcagtacagcgtatccgtcagatcgaacttttaaaggaaacctatacttacagcgaaagtccggaaagaaatggacgacttgtaaaaaaacaaccttttctttctcagtaagggtgactaagtcattctctttaaaaggatgcaagacaggttattatcgtgtcaaagccacgttcagcggttcaaaactcgtcaatacgacaaactcttttaaaattaaccgataagattcagggccctatgatgattagggtctttttttattcgttctttgtgagttcctgcgcgatttgaataaaaagttttgcggccaatgaagcctcctttatagaaggaacggcaagcagaacatctcggtacaccgcctgattgagttctcttgtcacgacattttccggcagcgatattcccgacatagacatttgtgataatatcgcaattcccagcccctctttgatcatgctgatggacgtattgacgttgtaaacagtgaatgcggcagtcagcacagatcctgcctccttaaacatatcaataaacggtgattcgtatcctccgtcacagatgatcatcggctggcggtcaagatctttcagagtgattgactcacagctgcaaagcggatgatcatttctaagcacgacggccattttatcttttttcagcggcagatattccatgtcttccgtaggaaaaagagtgatacccacatctattacccgggagcggagccattcctttacttcgttaaccgttccttcatgaagcaccaactcaagcttcggataccgttttttaaacacgctgatcagctttggaatgaaataagcggaagcggccggaaatgtgccgatgtgaatcgttccctgttcaagccctctttccgcggccgccagctgctcggctttttctatgcctttgagcacctctctgatatggacgagaatttttccgcccgtgtccgtgagccttacgccgttgcggcgctcgcggatgatcagcttgatgccgagctctgactcaagcgcagagatggcatggctgacagcgggctgcgtcatattcagcgcctgccccgcttttgtaaagcttcccgtttcagcgatttgaacaaaaacccgcagttgtgtaatcgtcataacgttttacttatgctccttataaaaaagattcattttatttatcttactgattaccgtatcatatgatggaattgttctacaaggagtgaacgacgtgaaacagctttcgaaaatacagacggctcttatgctggcgtttctagtcacggtgtggggaattaactggccgctgacaaaagccgcgcttgcctattcgccgcctcttctgtttgccggaatccgcacgctgatcggcggacttctattattaatggtggcgctgccccgttttaaaaagctgcgttttaaagaaacgtggccgatctatcttatttctgccattttaaatattactttattttacggcctgcaaacggtcggcttgaattacctgcctgccggcttattttcagccatcgtgtttttccagccggtgttaatgggcgttttttcttggctgtggctcggggaatcgatgtatcctttaaaaatagccggtcttattctgggctttgccggtgtcgccgtcatcagcgcagccggtttcggaggccatatttccatcgccggcattcttttggccttaggctccgcggtcagctgggcgctcggcacggtatatgtgaaaagaacgggcggacgggcggactctatctggatggtcgctcttcagcttctgatcggcggcgtgctgcttgtcagctccggccatttttcagaaagcttttcagcgattcaatggaaagctccgttcattctcagccttctgttcatttcagtttttgttatcgcgctcggctggctcgccttttttacgcttgtcggttcaggggaagcaagcaaggttgcctcttacaccttcctgatcccgctcatatccattgtcgtcagctcgatattcctgcatgagccgctgaccgtcagccttttagccggactgcttctgatcgtcacaagcatttgttttgtgaatataacaccgaaaaaactgaaaacacctgctctggccgcagaaaaaaaggccgttcattaaaaaaactcttgccgcggggcaagagtttttttatttattgacgtctccctttcacgagatacgcaaccgtaatgaggagatagatggccgcagtgatgcatgtgatgacgatggacgtcgtcgcaattacgccgatcaggatggccaaaagcgcaagcaccgcgaaccatgtcgtatacgggaaccatttgacgtaataagccggctgttctgttgaatgttttcttgattttaaatgggcgaatccgataatcagccagatgaacagcacggtatagccgagggaacccatcaaataattaaacgtctggcttcctgcgaataaagaaatcaggacgcctacatataaaaatgacgtacaagtcagaatcgcataaacgggaacctttttcttcgatagttttgaaaagattttcggcacccggccgtcagaagcctgcgtaaacaagacgcgggatgatccgtacagtcccgagttcatagacgagataatcgcaagaagaatgacggcattcataatatggtcggcacccggaattccgatcatcttaaatactatgacaaacgggctttcgggaacgctgttgacttgattccaaggaatcaggctgacgatgatgaaaaacggcagcaagtaaaaagcgacaatccgcgttaacgtgcttcggacagctttcgggatcaccttttcggggttttttgtctccgccagcgtgacgccgatgatttccgttccgccgtatgagtagatcacgacgagcatcgccgtaatgacaccccccgctccatgcgggaaaaaccctccgtgatccgttaaatgagacagccccggcgccgtgtgattgccgaatgagaaaaataatagcagaatcccgcataaaataaagatgacaatcactgtaattttaatgagcgcgagccagtactccgtctcggcaaacagtttcacagaaagcatgtttacaaccgtcaccacgatggaaatgatcaaagccaatatccatatcggacattccggcagccaatattgaatgaaaatggcggctacgaccgcctccgcggcaatattgagcacccacattttccaatagatccagtctaaaaagtatgcagcgtacgacccgagagactgctgaaccaaatcacggaacgtccttgcatgtttgtttctgacagccatttcggccagcccctgcataataaacagcagaatgattccgccgaggaggtaggccagcagcacggacggccccgcttcatcaatcgccgtgctgctgcctttaaagagcccggccccgattgcgcctccaagcgccatcatcataatgtgtctggacgacatcgtccgttttaacgtttgcttgtccttttccatctatcacacgccctctcgcaaaaaatgttcatcacataaaaaagcacgccgcctctttttagaaaagagacggcgtgcctcaggcagccgcggtaccactcttgttgatcccgaatatccggaatccagcttaaaaaccttttaacgaaggtcagccgttaggacatagggaatattccgacaattccgttccgccctgccacttccgggcgagttcaaagaacaatcagtccgcgttgcaccaacccgcggctctctttttctgactggattcttttactgctcccgttcacagtgttttatgttaaatgaatctcttgagtttttattttctgaatatagtaacataatatacagtcttctattttcaaagtcaatactaatttttgccgtctattgtccttcccgatgattcggaaatttcagctgaaatccggacacaaggctttgctttccgggcgccgcgctttccgctttcacctttgtatttgcgtataaaaacagcgcaagcgcaatgccgaatgatatgacgagaatccatgcttttttcatccaggtgcctcctcactttctatcatcggcggctttttctctttttttatacgccaaattgaaaaaacaattttaaaattctgttttccttatattgagacttgctttatcataaaagtatgcgtttacaatcgagtagggaggttatagcatgacccctgtgaattcaagcagcatcgggaagattcaggcggccagcaaaggtttgtcgccaaaattgagagcgattgcagaccatatcgtgaaggaaccgaaagacgtggttcacctttccatcattcagctggcggaaaaaacgaaaagctctgaagcgacgattttcaggctgtgcaaacggctcggtttttccggctatcaggatttaaaaatcgcgcttgctcaggagatcgttcaggagccggtgcagcacattcatgaagaaatgagccccgacgacgatatcgaagtcatcatccggaaagttttccgcacaaacatttccggtctgaccgatacctttcaattattagatccggccgacgttgaaaaagcggtagaaatgatccaccgcgcagacagaatcgaattttacggaaacggcggttccgggctgatcgccacagacgcgtatcacaaatttatgcgtacgggtataaattgcatcgcgcacacggattctcactttcaggcgatgtcagcaggtcttctcggtcccgaaagcgcagtcatcggcatttctcattcgggaagcaacaaggacgtgctcgacgcggtgaaaacggccaaatcgctcggcgccggcacgatcggcattacaagctaccaaaagtcgccgctcacccagatttccgacgtggtgctgtatacgtcaacaagggagacggctttcagaacggaagcaatgtccgcaaggcttgcccagctgtcggtcattgataccctgtatttcgccacggcccggctgcggcaggagaaaacgctcgccaacttgcagcaaatcagaaaaatgatcgcgcacaaacgtttgtaatatttatttttcaaaagagagaatgccgatacagcgggaattgaggcaattttatgaaaaaaattttcttcttcatcgttgatttataaaaaaattattcctataattgactttgtaagggcatacattatcaatctatcttattattcaatcagattaggcgggatatattatgaaggaaacccaagctgttatcggtctggatatcggcacgaccagtacgaaagccgttctgttcggaccaagaggcaaagtgttagccaagcattcggttcactatgatttaatacagccaaagccggcatgggccgagcaggatcctgagcacattctggaagcggttatcggaagcatcagaggcgccgtcacaaaggccggactgagccctgacaatctgcttgcaatcggcatcagcaccgccatgcactcattgatagctgtcgatcaaaacggcggcctgctgaccaaaagcatcatttgggcggacaaccgcagcgccgagcaatcaaaacgtattttaaaagagatgaacggttttgatatttataaaagaacgggtacgccgattcacccgatgtctccgctttccaaaattgtgtggatgaaagaacaggacaaggagacattcgcgaaaaccgccaaattcatcagtattaaagaatatattctgcacgagtttttcggaacttatgtcgtcgattattcgatcgcttcggcaacggggctgttccgtttagatacgctttcctgggatgaagaagcgctccggattgccggaatccgggaagatcagctgtcggacatcgtgccgaccactcatcagctgcgcggccttgcgccggaaatcgctgcacggatgggcattcatgcggatacaccgtttattatcggcgcaaatgacggcgtgctcgccaaccttggagtcggcgcgatcggcaaaggcgaagtggccgttacgatcggaacaagcggagccgtgcgttcggtgacggatgcgccgattacggatgaaaaagcgcggacattctgttacgcgctgactgacaagcattgggtcatcggaggcccgacgaataacggaggcattatgctgcgctggcttcgagacgaattcgcttctccggaagtcgaaacggcgaagcggctcggcattgatccgtatgatttaatgattgatatcgctgataaagtgcccgcaggctctgagggattgctgtttctgccgtttttatcaggggagcgcgcgccgttttggaatccgaatgcccgcggaacgtttttcggcatcagcctccgccataaacgggagcattttatcagagcggtgctggaaggcgtcatcatgagcgtcttttcaatcggtgtcgcactgagagatttggcgggccccgcaaaagacgtgcgggcttcgggaggatttgcgagatcgccgctgtggaggcagattttgtccgatacgatgggacgggaagtcctcgttccggaaagttacgaagcctcggcgctcggagcggccgttctcgctttgcacagccttggcgaaatggaacggatcgaggatgttcaggactggatcagaatttctcaccgccatgaaccgaacgtcaaaaacagcgaaacatatattgagctgttttacttatacgagcggctgtatgacaagctcaaagatgaatttgacgtcatcagtgaatttcagctcaaacaaagccgttaattcttctttgaaagggtgaaaaggtcatgttactgtttattgtcattgccgctattatcgttttactcttattgattacggtcgctaaattaaatccgtttatcagtcttttgattacatccatccttgtcggtttcgcaacgggcatgaatctgccggacattatcgcttcgatgaaaaccgggctcggcaatacgctgtcgctgcttgcgatcgtgctggccctcggtacgatgctcggaaaaatgatggctgaatcaggcggtgcggagcgtatcgcccacaccctgatcggccgcttcggcaaaaagaaagtgcattgggcgatgatggccgtcgcttttattgtcggcatcccggtctttttccaggtcggcttcgtcctgctcgtgccgcttttgtttacgattgcgattgaaaccggggtttcattagtgacgatcggaattccgctccttgcgggactttccgtcgtgcacggattggttccgccccacccggcggcgatggcggctgtcggcatttatcacgccaatgtcggaaaaacgattttgttttctttaatcgttgggattccgactgccatcatcgcggggccgctttacggaaaatggattggtaagcgcattcataaacccgttcccgaactgttgaaaaaacaatttattgaacggaatgaaaaacgcaagcttccgggattcgcaaatacattgtttacgatattggtaccggtgatcctgatgcttatggcaacgcttgccgaaattgcgcttccggaaaaaagcacgctctatgaaacttttaaatttatcggcgaccctgtcacggcgcttttgatcgccacggtttactcctttttcagccttggtttttatcagggctttgacagagaaagcattttaaaattcagcaatgactgtctgggaccgattgcttccattctgcttgtgatcggagccggcggcgcttttaacaacgtcctgattgattcaggcgtcggcacgtatatcgctgacatggcgaagcattcaagcttctctcccgttcttttaagctggacgatcgcggcggtcatccgtgtcgccacaggttcagcgactgtcgccatgatgacggcggccggcattgttgcaccgattgcatctgtcatgccgggcgtcagcagtgagcttctcgtattggcaacgggagcgggctctttgattctgtcacatgtcaatgactccggtttctggctcattaaagagtatttcggaatgacggtcaaagaaacgttcctgacatggacggcgatggaaacgattatttctgtcagtgcaatctgttttatcatgatcattaacgcgtttatataaaaacaacccccggccgcaaaccgggggttgtttttttatcggtcattcacgaggatataagcggctttaacgggtccgtggacgccgacaaccaaatccatttcgatatcggccgagttgctcggtccagtaatatagttgatgcaggaaggaacggtgacgccgtctctgatctgctgtttcagtatatcgctggcctgtgtcattctcggcacaatggaagatttcgggatgattgcgatataggtggtcggaagcaggctgacagaacggccggcatgctctgacgcatacaaaacaacggtggctgattccgcaagcgtgatctcgctgaatgtgatgcccacattcgcttgttccgctttttcaatatttttcgctccttgttccgcgtcccattcccaaacgggaaccccttcatccggccactcttctgtcataagggtctgcaagccgtacgtttcaaaccggctgtccttcggaatgatgacaggccctccttcaaagcggttcacctgcgtgcgcaaagcgtcgtaaagcccggctgcatccgtttcgatcagttcggtatgaatgttgacgcagtggtctttcagcatcgtgacaagatcgtcttccgtacagcccgcatgcgtttgatattgaggctgatacttccattcaggcagggacacgcctgatttcctgcgctctctgcccagactttcggcgatccggtttaaaaaggattcctgatgtgtaaccgtccctttcatcatcattcttcccccttttgtttttcccggtctttaaaccaatctctgaatctcgatttatgcggcgccgggaagtcccgtattgccgtccattcttttaacggccccggcccttttgatattttgtcatcttccgtaaacggcgtcatggcggcaggcgcccatttcgatcccattttataaagggacggggatgacgagccgagcccgaaggctttcatcgccagtttttcgctgatcggcgctttgccctctttttccacgatgttctgccgatgcttgagcagcagctcgtgcaacggaattttaacgggacatgcttccgtacaggccgcgcataaggaagatgcgtacgggagctccttgtattcgtcatatccgccgagaagaggcgataagacggcgccgatcggacccgaatagatggacccgtacgagtgtccgccgacatgccggtacacgggacagacgttgatgcaggcggcgcagcggatacattgcagcactgattgaaattccgtgccgagtatgcgggaacgcccgttgtccacaaccacgaggtggaattcctcaggcccgtccgcttctccttgctgccgaggtcccgtcagcgccgtaatgtaacttgtaagccgctggccgaccgcgcttctcgtcagcatgctgacaagcacttcaaactcagaaaatgacggaacgatccgctccattcccatcacggtgatctgcgtcttcggcagcgcggacacaaggcggccgtttccttcgttcgtcacgagactgaccgatccggtatccgcgatcgcaaagttgcagcctgtaatgccgacatccgcttcgagaaattttttccggagaacgctgcgcgcgtgcatgacgagctcttccggtttttccgtctgtttgtattcgagtctctctttaaacacgtcacggatctgctctttgtttttatgaagagcgggagcaacgatatgtgacggcggatcgtgatcgtcaatctggagaatgtattcgccgagatccgtttctgtgacttcacagccctcttcctcaagcacttcgttcatattgatttcttctgtcaccatggatttggatttcacgatttttttggcgtttttctgccggatgacatcgcggatataggaggacgcttcttccgccgtttcggcgaaaaagacgtgtccgcctctgttggcgacattttcggcgagctgttccaaatagaaatcaagattgtccagcacatgctgtctgatttcttccgcatgtgaacgccaatcctcccagtttcccaattcttcggccgcctgcagccttcttgtcctgagccgttcctgcgctccggagacggctcctctcataaactcattatctattccttctgatacccgctctttaaaagcggcggtaccgattttcatcgccatgattttccccccttgttgtttctcgtgttatctgctgttcagcacttcggcgatgtgcatgactctgacgtttttatccttacggtcaagacgcccgccgatattcatcagacagccgcaatccgccccgatcagcacttcggcctccgtgtcttccacgcaggcgaccttctcatccaccatttgttcagagatttgagccattttcacagaaaatgttcctccgaatccgcagcattggtgctttccgggaagcgcggtcagctcgagccccttgacatggcgcaaaagcttcatcggctcctccgacacgccgagcagcctcgtcatgtggcacgatgtatggactgtcgcttttttatgcagcaccgccccgacatcctccaccccgagaacgttgacgataaaatccgttaactcatatgttttgtccgcaagctgctgcgcttttgccgcccacttcggatcgtcctgaaacagatgcggatattcacggaacatcgtcgtacaggaacctgacggactgacgacgtactccgcttcttcaaacgcggcaatcatccgcttcatcgcttttttcgcatccgtcacatacccgctgttgtatgcgggctgcccgcagcaaatctgcccctcgggaaaatccacctcacacccgagccgttccagcacctcaaccgtcgcctttccgacattggtctggaacatatccacaaggcacgtgacaaataatgagactttcatgatgaacccctctttcatcctcaatatgtgatccggtcatctgatgacctgtttttgggaaagctctatgaatatcctacactattctgaatatggattggaaggtttttctgaaaaatcctttcgtccgatgcgctgaaggggacaaaaaaagagaagcccgaaagctcctcaagctgctctacatcccgttttccagcagacgtcccagtttttgcacaccctcttttatcgcagctttaccggcataactgaacgacaggcgaagatattccgcaccgtcttcctgatgcagaaaaaaatatttaccgggtacataggaaacgccgtgagacagagccctcgccagcattgcggatgtatccgctcccggcgctttcacccatacaaagtaaccgccttccggcacgtgccaggatgcggattccggaagatatcgcgctgatgcggcgagcaaaacgtcacgtttgctccggtatgcttcccgcaaggcggcgagccgtttttcaacattcgtttgttccagatagacggcggtcaccgcttgggaaaacgggtggcctaagtctttttttaaccatgacaatgccgtgatgaatgcggcgtctcctgcaatccagccgatcctcatacccggggcgatgacttttgataatgaaccggcgtacagcacccgtccgttttgatccatggctttcaagggcggcggaatatcggtgaatccgagctcgccgtatgcatcatcctccaagatgagaaaatcatacgcttcggcaagctgaagcaggcgggttctccgcttcgctgacattacggttcccgcaggattctgaaaagcgggtatcgtgtagagaagacggggaagcagaagcccttttcgttttctttcctcaagcatgaacgctaatgtttctgtttgcaggccctcttgatctgtcggaatgctcatgatatgcggtgtgtaatttttaaaaatctcgagcgcttccatgtagaccggagcttcaacggcagcggcggtttgttcatcgaggaaaacccgtgcagccagatctatcgcctgacaggcgcctgacgtcacgagcagctcatcgtcccgacagtgaatgccgcggatggctacccgttcttgaatctgcttttttaaaacggccgtcctcgggcttcccatataatgcagcggcagatcgcgctcctcatccagaaggcgggcggcggcttctttcagctccttatcaggaacgagtgcgggatcgggatagccggaatgcagggggatgcacgctttcggaactgccggcatccattccccgggaggatcgtttgtcagagctttctttacatggtcagaaaaaaaagattcggcctgcatgtgatgttatcccctttcacaagtcagcttctatacattttcttcaaaataagcccccagcacttcttccacattcgtcaggtgcgccgtcattgcggcttccgcttcatccgcgtctttggcggcgacggcgctgtaaatgcgttcatgctcttcatacaatcgctgcacgctcgttcgtttagaaaacagccaaatttttctcgtttctctcattgtttccaaaaggagcgcggagacatgattcatgagatgcttgagcagcccgttttgtgatgcttccgccagcgccatgtgaaaggagaaatccgctttttcgcccaattcttcgtctccgtcaatgtctttcatctccaggagagcttggcggattttttgtaaatcgtcttcagtgcgtttttcagcggccatggcggcgacgccgagttcaagcagctttctgacttcgagcagctgtttgacgtcctcttttttcatcaagagggcggaagaaagcggctgggaaacatgagacggctcaaattctctaatgtatgtgccttctccctgcttcatgtcgacgagccccatcgctttcaaagccgacagcgcttctctgaccgccgagcggctgacctgaaaactctcagaaagcgcctgaacggaatcaagcttttcacccggcttaagctcgcccgcttttatcttctccagcaatgcgtcagcgacttcctcgtagatttttttcgttttaatttgtttatatttcaacgcgatcaccccgtcacttgtgaatcttgatgtttatcgtctattatacttctttttttgtattgccgacaggttcagacaatttgttcaagaaaagtattgtactttcaaaactttcaaaatataatgctaattaacccggtcatcagatgaccttatcataaaaagtaatcgcttacatgacataaggaggggttttttagggatgcaatggacacaggggtacgctcctttagggggaaatttgcttttatcggcagcttgcgcgctcgtgccgattatcttctttttttgggcgcttgcggtgaaacggatgaaggggtacatcgcggggcttttaacgttagccgtttcacttttaatcgctgtatttgtttacggcatgccggcggaaaaagcggtgatgtccgcttctcagggagcggtgtacgggctgcttccgatcggctggattatcgtcacatcggtctttttgtataaaatcaccgtgaaaacgggacagtttgagattatccggagttcggtgctctcaattacagatgaccggcgtttgcaggcgctgctcatcgccttttcattcggggcatttttagaaggcgccgccggtttcggcgctcccgtcgcgatctcggccgctttgctcgtcggacttggttttcagccgctgtatgcggcgggaatttgcctgattgccaatacggcgcccgttgccttcggcgcgatcggcattccgattaccgccgtcgaaggtccgaccgggataccggcaatggaaatttctcaaatggtcggccggcagcttccgtttttatccgtctttattccgctgtacttaattattttgatgagcggatttaaaaaggcttttgaggtatggccggccattcttgtttccggcgtctcctttgcggccgtgcagtacgcaagctcgaattttttagggcctgagctcccggatgtgctgtcggcgcttgtttccatggccgcactcgctctgtttttgaaattttggaaaccgaaaacggcctttcgtttcgcggcagaacgggaatcagcagcggccgctgaccgggcgccgatcaagtacgggggcgccgcggtgtttaaagcgtggtctcctttccttcttctgacggccatgatatccgtttgggggattcccggcgtaaaggctgccttaaccggtcattacgaagggacgtcaatgtggctttcctggctgaatgcagccgggcgtgcattgaccttcacgcctcccgtcccatttgtgaatcagcagattcttcaggcggacggcacgccgattgaagccgtgtataaacttgaacttttcggttcagcggggacggcgattctgattgccgccgtcatctccaagttcgccctcggcatgtcgtggaagacatggggcgaagcgtttatagaaacggtgaaagagttaacgcttccggtcgtgaccattgtttctgttgtcggctttgcttatgtgacgaatgcttccggcatgagcacgacactcggccttgcgcttgccatgacgggcgcgatgtttacctttttttcgccggtgctcggctggctcggggtatttattaccggctctgatacgtcggccaatctgttgttcggcggattgcaaaaggtgacggcgctctctgtcgggatggacccggttctctccgttgccgccaattcatcaggcggtgtcaccggaaaaatgatttctccgcaatccattgcggttgcctgtgccgctgtcggtctggcgggcaaggaagccgaccttttccgttttacgattaagcacagtctgtttttgcttctgctcgtctgtctcattacatttttacagcatcatctgttttcatggatgatcccgtaatacggagaacctccccggggtttggctcggggaggtttcagctgtaccgttttctcgccgatgacggcggaatatttaattggtcacggtatttggcgacggtgcgccttgagattcggatgtcatattgttcatgcagcagatcggcaagcttttgatctgaaaaaggtttctttttatcttctttaccgaccaatgcctctagatgcgcttttacggcataattggaggcgccgccgtcccctgacgattcagctttcgccgagaaaaatgttttcatttcatacagtccgtacggcgtctgaacgtacttccctttgatggcccggctgatcgttgattcgtggagctccagcgtttccgccacctctcttaaggtcagcggctgcattccgctttttcctgtgagaaaaaaggattcctgccgttcagtcaggacgccgataattctcgtgatcgtttgttttctttgcgacaaagcccggttcagccagcgccattcctgatattttgccgacagataatttttcgtgtcacggcacccggcagctgacaagagcggctgataatgggtatgaagctggatgtcaggaaacgaacggctgttgagccgcgcttgaatgatgccgtttttcactgtgatgaaaatatccggttccacgtaaaaacccggctcctcatgcgcataacggagccccggcctcggatcaagggcgctgatcatgtcagcgatgtcctgaatgtctttaagcggaatgcccgttttcagtgtaagcgctttccagttctttcttgcaaatagctcaaaataggcgccggcaatccattccgcctgttcgttccgctcgggaagacggcggagctgaagaaggatgcattcctgcaaagacctggcgccgattcccgcgggctcaagggattgaagctttttcagaaccgcttccgtctcctcttgtgaagcggatacatggtcggcggcagctggtatgtcctcttttaaatatccgtttgagtccaatgaatgtatcagataattgaaaatctttttctcatcatcggacagcttcatgtctaaggcttgctgtttgagcgaatcctgcagtgttttgcgggtaagtctgatctgctggcttccgtcccgttctttcatcctgtttttacttgttttatggtaagatagtggcggcgtgtctgtttcctttcgttcaatcagagggttttccagtgagagctcatcaatatatccggccagttccgcggaattgtatccgagtaatgtgatagcctgtttaagctcttgcgttaattgaggctttaacatttgtgtttgctgaagtttgatatccatcatgctcactccccttttttcattgtacatgattggtttcataccgtatatacttattaaaaggagttgctttatagatgtcagaacttttttctgttccttattttattgaaaactttacacagcacattgaaatgaatccgaatgaagaccgaattcatgcgatgaacagctattaccgctccgtcgtctcaactcttgttcaggatcagctgacgaaaaactcggttgtgctcaaaagaattcagcatttggatgaggcgtacaacaaagtaaaacgcggagaaacaaaataaaccttccgctcattcaaagcggaaggttttccttcgtgccggcggtttccccgatcagacggacatccggcgcttcgtgcatccaggtgtgataatagttggcatttttcccgtatgaattatcaatgacggtattcggtttcccgagaagcgaggacagaatgtggccgtgaagccttgacgtttccaccgattcgtacctgctgaaaaactggaccgatttcttcgttaagaaatcggaatagcgtttccaaaaccgcgcaatcggcagcgggtttcccgcttttttattcaaaacattcagcgtttggaaaaaagcgattcccctgcggtcgcttgctgacagcacatcctgccagtcgcagcttttaacggaagaattgttttgcagcttcggattgatttccccatccgtgcggataaaatgaagcctgccgcgtgacggagccgctgacgccgccatcggatacagctgatgggccatatcaggcataagcccgatatgattcgccgaaaaaaagcatttcgcggtctcgtatgacacatgatctctcgtaaacaggtggagatccttgtgctccgcaaaaagcgccgctgtcttctcaagccgtgtctcatcctgataatagatggattgcggcaggatgacgatcctgttttccggaaaggatttgacgattttttccctgaacgtctgatagtacggatagagatccccgaaatttccgccaccctgacagacgatgatcgtctttttgtccgcccggcgcccgaatggaaaattgtcgggattccagcgctgtttcacgcggatgccgtgcgctttaaaaaacgcctccgtccctttcataatcaataaatcccctacatttccgtagaggggatagtcggcataaatgatgtcagattgcggcggtatcacgctgagcagacccgtcagcgtctcttttaatcggctcataacatggcggctgtccatgttttctcccctttcgtttcaaacagtcgcgcaagtgcgtcaatgacacgctgctgctcctcagaagacaagtcagacccggacggcagacagatgccccggctgaaaaggttctcagagacacgctcatgttcgctgtgaggataaaagacggaagatgagaaaagcggctgcgtatgcagcggtttccacagcggccgggcctcaatgttctgttccgcaagacaggcgacggcttcttccggcgtcacgccgttatcaagcgtcagagccgtcagccagcggtttgaaaccgttccttcaagctccggcatcatgcggatgcccggatacgtttccagcgcttcccgatacctgtgaaagatttctctcctcgcccggacgcgatcttcgagcacttccagctgcgatatccccacgcccgcgagaatgttgctgagcctgtagttatacccgagctcgctgtgctggtaatgaacggcggcatctctcgcctgggacgcaagaaacctcgctttttcaatcgcggcttcatcgtcagacacgagcatgccgcctcccgatgttgtaatgattttgttgccgttaaaggaataaatgccgaaacggccgaacgtgccgctctgcctgcctttatatgttgatcctaaggactcggcagcgtcttcaatcagacagacgccgtatgcgtcacaaaggctcattaattcatccattttcgcgctttggccgtaaagattgacgacgatcaccgctttcgggagtctgccgcgccgctttgcatcccgcagcgcccgctcaagcgcatcgggcgacatattccacgtctcccattccgaatcaataaaaacgggctcagcctgctcatacacaatcggattcgccgtggcgacaaacgtaaaggaaggacaaaatacaacgtctccttttttcacacccgcaagccgcagggcaagatggatggcggccgttcccgagcttacggccgccgcgcttttcactcccgcatattccgcgagccgcgcttcaaacgaattgacgagcggaccgagcggggcaatccaattggaacggaaggcttctgcgatgtattcctgttcttttccgctcatatgaggcggagacaaataaatccgtttgtttgtttgcatgaaatcatcctttttcattatggataggggagatgacgcgggccggaacgccgaccgccgtcacatggccgggaatccggctgatgaccgcagcccccgcgccgataacggaccaagggccgatgtcaatctgcggtatgacggacgcgccgattccgatgtgcgttccttccccgactttcactccgccggcaagcgccgcgcgcggtgaaagatggacgtaatctccgattgcattgtcatgatcggcaaccgcccccgtattgatgatgcaatgggcgccgatgtcagcgcccgcctgaatgacggcgcccgccatcacaaccgttccgtgtccgacggaagccgtttcactgacgatcgccccggggtgaatgagtgcggcataatcgtcatcttcaagcccaagcgtttcagcaagctgctttctgacgccgttgcggccgatgcatatcgtgaatacggcctcggagacgagtttccgaagcatgggcacgtctttcgtccggcccgtatataaaccgttccgaacggcaaaaccgctgaatccgtcatccaatatgcccgcaagctccatatcggaacgggcctgcacgatttccttcacgacttttccgtgtccgccgtttccgatcagcacgacctttttcacgatgacatatctccgctgcctgtgaagcgctttgccgtcacatggccggcttgatgtatgccttctgacacgagaacttttttcactgttaaaagcagaatctttaagtcgagaagaaatgtgcggttgtcgacgtaccacacgtcgagcttgaatttttcctcccatgaaatcgcgtttctcccgttaatctgcgcccagcccgtaatccccggcttcacctcgtggcgccgcgcctgctctgccgtgtaaagcggcagataatccatcagcaaagggcgggggccgacaagactgatatctcctttgagcacattaaaaagctggggaagctcatcgatgctcagttttctgatcagccttcccgttttggtcagacggagatgatccggaagcagcacaccgttttcatcacgcgcatccgtcatcgttctgagtttatacaacgtaaacggacgcccgttatgccccggtctcgtctgtttgaacaataccggagacccgatggcgcatctgacggctgccatggcgaagagaaggatgacgctcgcgccgcacaataacaacaccgcggccgctatatcaaatacacgtttcgccttcaaatctgaacagctcctttcacttttcggcatttctgtaaagcaagccgcctttcttctttcgtacaaatgaagaaaaaagcgaatgcggcatagctcatgcatacggcaagccccgcggcgatcagaccggcccagctgtcaagcggtgaaaacagccggataccccggcagacagcccaggcaaatacggccgccgccaacgggccgaacattcctttgtaaaacgcggttttctgaaagcccgtaatatgcgaaacatacagcggcgtgaagacggcatttttcaaaatgagagagactgcaccggcgatggtgatgccgtacagcccgagatgagccggaccgctgagaaccacggccaatacgacattcagtccgcctaaacataaagtaacgacggcgggcgttttttgtttattaaaagccgtccatacgtaaaaaagcggcatgacagagagactgaccgccaaatacccggcgtgaatgtataaaagcggcgccgtctgcacaaacgacgggcccagccaaatcgccagaaacggttcggcaagccctcctaataatgcggcgggaagcgcgaggagaagcccgttcatccgcacagccttattggcgtaagacaggagaccttccatatccccttttgagtaataggaagtcaaaaccggcgcaaacagtgaagcaagcgtcccggcaagacttctgagcaggagcgggaattgaataatcgccgcatagacacccgcctcagacggccccagcacgaggttggccgtcataaggtcaatctgcagaaacagcagcacgccgatctggttgacagagctccaggcaccggccgaaaacagcactttgctcgtctgtaatgacaaggttttacggctgaaagaaaaccacggaatcaatttcttaaagaagaaaaaagtcagcacggccgcacagacggctcccgctaatgccgaaagctggatctgccagattttcggcggcaggcacgtaaacagagcgagcacacacagcaccctgaccagcatttgcacggcctgaatggaacttgtgatataaagcttgttggcaaaaaacggccccgtcgcgaatgccgccataaaaaacgtcagcataaacagcacgctgccgattacgatggacagcctcacatccgttagcagcccggccggcacattcataatcttgtcaataaaaaaagccgtcccggcgagcggcacagcgagtaatagagatatcacgacagacgcggctaaataattgcttacatacgcattggcctcgtccctgttccccctgtgggcggcgacggagaaaaacctcacaacgacagagctcagcgcaacggtaataatagagaaatagttaatgatattctgtgtcagatggacaaacccaaaagcctctacacctaatgttttcacaataaagggcgtcatccacactgatagaaacaccgaaagtaaaaacgccgtcacattggcgccgaaattaatggcaaatttcatgctccttccgcactgcctttctctttcgatttccgttcgaaaaacgcatgcagaagaagaggaaggcgcattttgcacaggccgagcaccacgcgctcccccgccagcagctgtttatggcggcacggcgtcctgcgcaccgccgtttttaccatgtcatacgttaagattctgccgatgtgcgccgtaatctgatgtgacggctgcggggcggcgcatgcgttggcgatcagcatcggaatctgatgcttgcacaaatatgtatcgatatcgctccggcaggcgtccgtcagcccgttttcctcataaaaagccattttcgctttatattgcttttgcagttcgtgatctaagtggggcttaaacggtgtttctgtaagactttgcggattttcccggtagatatacagcccttcgtctatcactttgatacgcgcggctcggcggaacgctgccaaattaaacggagagtcttcggcaaaccggatatcttcatggaacaacagcccttgcaatgcttctttccggtatatatagcgccacacataccaaataaaccgatgttcgtgcgcacgggtcagcaatgcagtcatttcatccgctgtgaagacgcggcccggcggaagggacggcggcatatatgttcttttcttagacggcgtttctttataatagccgcagccggcgatatccagccggttcttctccgcttcttcataaagccgctcgaacatcgtttccgtcacatagtcatcgccgtccacaaaaccgatataacggccgcgggcggcttttattccggcattgcgggccgagctgaggccgccgttttctttatgaatcacccggattctcgcatcttctgcggcgaattgttcagcaatccggcctgaccgatccggtgaaccgtcattgacgaaaatgatttcgatgtctctcagcgtctgttttgttaaagaaaccgcgcattctttcataaaaggctctgtcttatacatcggcacgatcacgctcacaagcggcgcggtcattgggcatcaccgctgattttcgagcgcagcccggcaaaataaacactgcgcaaagaaccgccttcctcatgcttgccgctgagcagccggtttacggcggccgttacggcttcagggtctggacgttcaagcaatgtcatgttcggtatgtttttcagccattgatagccttccatcactttatgatcaaacgaacgaatgacgacacaaggcgttttcgtcagcgcacaaaaaatcatcccgtgaagcctgtcagtgacgacggcttccgcgcctttcagcgtattccaaagcgcctccagctccttttcacgtgtatggcggctgaccctccggccgaccgtcgtcgtaaaggaatacagctctccgtactcctccgccaaagcttcttttaccatcgttctgtcctcagccgtcagcgcactctccttatcctcccgtaaacagaggtagatcccttcccgcgggatgcgccgctcgcttttatccaaatataagaccatgtcaggctgtttgagcactgtttttccgggaaaatgacgcttcatccattgatacgtcgtctcatctctcgccattaacaaaaggtcgggatgcgcattgtacacttttcgggcgcgcttcagttccttccgtcccttttttgattcagaaaaatgagccgtcgccggaagctgaacgatccgatattgccggaatgttttgatgataaagcggcgcgtccattcctcataccggtacaaatcccccatgttcccgccgccgatgatgaataccatatcatcggggtggcgctttttgatcagcgcttttgcggatctgtatatatccttcatatccacctcgacaatgtcaaaatcgggatactcccgttcaagaaacgttttgcttgcgtaggcgatggcgtggtcgccgagattatcgtgggacgggagcagcgtcagaatgatcttttttcttgccgctgtaagccccgccccatccgttgccgttccgaaatgaaattgggacgggtatttgaccttaagcaacagccattccgcgagattgatttttaaagattgtatcgacatgtcttcaccctctgattttcattttgtactcgattgcccgctgatacgcggctgatgccagcgacacgaacggaatcagcttcagcttcgccaaaagcagaaggcatgagcgtttggcgtcaaacggcgccgttccggttttggaaaggctcaggcgaaacacgggatcagcgcatatccggctgatattcttccacttctcagaaaaccggccgccgttattccgcttccattcattcagcaagcagactgttccgtgctgaacgatgaaaaaatccagctcctgccggtattcctgtaagcagccgttttcacgcaaaaaagcctcgttcagccgatagagaacgagacctgagtcaaacagctttttctgatagctttgcacaatggaagtcaagtgaatccgataatgatagagcggctgatccacgtacgagaccgcacctgcgaaaacatgcgcccggaggctgaagtactgatcctccacgtgctccagctcatcacgaagcggaaagcgcagctgatgatgctcgatcatggttcttttgtacagcttgttccatgaaaaaccgctgactcttccttcaaataaatctttcaggtacagttgtttcgggcgccccgcgtacgctgaagcgatcgttgaaacggcggttttccccgtatccgcaaactcggccgcatattcgcaaatcacgagatcagcctgatcagccttcgctttttcatacatgcgcaggcaataatcaggttcaacccagtcgtccgcatcaataaaagcgataaattcgccgcgcgccgcctcgatccccctgttgcggactgcgccgagcccccggttttgctgatgaatgacccggattctctcatcccgcttctgataggtttcaagaatcgccgggctttgatccgttgacccgtcattaacggccacgatttcgatattggcgagcgactgattgagcaatgaatctaagcatctttctaaataagtttccgtattatacacagcaattaataaactgaccgcgggtgtttccatataaacctccaatgtccattaccgggaaaaaatcgttctgtacggaagcacagacgaatcgaccggcataagcaagtaactgtaaagaaaataacagacaataatggcgatataaatcagcgcatttgatttttcatcaaaaattctcacaaaataagggatcaggatcatttggtacaggccgaaatatatattaaaccgggcgaaaataacatcctttgtcgccaaaagaccgaagagcaggccgagcagacagaaattcacgatgacatcaatgtcaggccagagcttccgcagccgctcccgatagcagaaagccaaaaacagcggcagaagcagcaccgcgatttttacgacgttcatcccgttcgtattggtcatcagccatttctcataatggccgtatgagctgttttccagcacgacgacaaaaagcgaaatgaacttctgatacagaaacgtcataagaagaaacaatgccgacagtccgaaaatcgcaggcgaccaggctctttttctgacgagaaaataaaccggaatcataatcagcgctgaggaatgaaaaagcgaacacagcagcacgattgacatataacgcttccagcttccgctgatcacgtagcggacggcccaaaacaaaacggccgccaccatatactgcctgatcccgttaaaggaagcgtaatagtgatacgtgcccaaaaacaaaaacacactcagctcaaacggacggccgaactcaacgagcccctttaaaataaagctgcacgtcacgaccgccacggtgaaatacatgatttgcggatctttcgtgataaaattcatgagccagatgagagccgtaaaccccggatcaacggctgcttttttcgctccgaacccgaagatctcccacatgctgccgtaatttcccgccagcttgtacatcagcgcgtatgtctgaaaatccgtcccgactctgtagcgcaaaccggagaccaatacgagcgatagcagcggaacgatcatgacgagctgattcggccggtatccggtcgaaagcgattgatcacgcccgccgcacattttcgcgaaccatgaccaaatatacacaattcccatattgactacatatacaatcattcgttactgttcctttttccaattcatattgtaaagcttcataacagcccccgcattttctcccgcgtcatatccctgccgtctgagggtttctttaatgcgcgccccgtcaggctttgccgcctctgctgcccgtaacaccgcggatgcccattgtccgggcggttctttgaggctgagccttttgaccagcccgagcccggcatcggcttcttccgttatgccgtctgatattacgcacggcaccccggaggcctgcgcttcaacgagcgtgacgggcagcccttcataaagagacggcatgacaaatacatccagcgttttcagcagggcatgaacgcggtcttctatgccgataaaacgcacatcatcatcaagccccagcttcgccgccagattttccatgtcggtgcgaagcggaccgtctccggcgagaatcagctgtaaaccgatgcctcgctctttcatatcagcggccagccggagcagaaattcgtggtttttttcttctgtaaagcggccgatatggccgatcaccaaacggccgtctgcaatgccccgcttccttttttcagcttctgtatccgcgcacccgccggcaaataagtcgagatcaatgccgttcggcaaaagatgcacgtctttttctttcccgaataagaaatggcccgcgtcttctccgcaggcgcacagtgccgtggcgtttgccgtgatcagccgtctgaaaacaaacagctgcatcccggcaagccgcgacgcccgcccccgccacgacgtactgtgcgaatggcagatccgcaccgggacgccggctaaacgagcggcaagcgcgatgaatcccgactgaaaatcggtatgggcgtgcacggcggcaaacgggcctttttcctgaatcacccgcttgacctgtttcacaaatgtaatcgggtttgtgctgccgatgctcggcacataaaaaagccgtccgccgagagcgagaatttcctcatcataagcgcacggatcgttcctatgggttaaaaaatcaaactgcaccttcgttctgtccatcttccggtacaaattcatcatcatcgtttctgcgccgcccctgttcatcccgctgaagatgtgcagcacccgcatcgatttgtcagtcatgttcggcaagcccttctttttggcggatgtccctgtttttatgataacggttcatgaccgcgggcggcgtaatggcgcggatgagaggttttgcgatatacgcgtaatgggaaagcggcagcttcagccgtctgcatgcctgaaaaacgaggaccgcgttatcaatggaatacgtaaacgatctccttttaaacgcatcactgtcctctcttactttatacagcgtttcttggagattgtacccccggaaacccgcttcaaaaaagcgcagccacaaatcgatatcctccatccgccgcgtccgcctgactgaccggtagccgccaagcgctttgtacgcttcagcccgcatcataatggtaccgtggcagaacggtgtgcctttcgccataattcccggtttcggcacgggcggcaaaagccgggcgccccttacgccgaattcgtcaaatacgagcatccccgtgcctacgacttgatagtgggcgtgcttgtttaagaaagcggcctgtttttccagtctcctcgggttggagatgtcatcaccgtcctgcctggcgatataatcccccgttgcgtatgtcagacagcggttcagcgaagcggcaagccgttgatttgtcttattttgaatcagcgtgatccggtcgccgtaatgatccgcgtaacggcgcgcaatctgatacgttccgtcagttgacgcgtcatcacacataatcagttcccaattcttataagattggctcaggatggattcaatactctccgctaaagtctcttcgcaattataaattcccatgatgacggaaattttcggttgtgctcctgcattcatacgcttttctcctttttatccatataaccggcgtaaatgtgcgccatttcctttaccgtacgtgtttccgaaaaacattccgccgtcctgcgcccttcttgtcccattgcttttcgcagacacggggagcggtacagcttttcaatccgatcggcaaatgccgcgctgtctccggccggcacgagaaaaccgttcacgccgtcttcgatgatctcacggtgtcccctgttgtctgcggcaacggccggcttttcggcagccattccttcaagcagattcatgccgagtccttcacggatgcttgaggcgacagacagatcggcaagctgaatcagttcatgaatatcgcggcaaaaaccgtaaaaccgcaccatgtcggatacaccgagtgattcagccttttttctgtacggcgcttccatcacgccttctcctgcaaatacgagtttcagctccgggatgcggttcttcagcagtgccgcagtctcaatgagaagtccttggtttttattgccgtttaattcagcggggtatacgagaataaattccccggcgccgaagccgtgtttttctctcagacgttcactctcttcccggctcacagggcgaaacctgtctgtattcaccccgatgccgtgtatttttttcgcgccgcaagctgtttttttcatttgcttggcccgttcgtaatcctcttcattaatcgtaatcagacaatccgtataagaagaaagaaatttttcgatcgggtaataaagaagccagtttttcaggggcgctccgtcgcagaagtgaaagccgtgcgcggtgtacagcacctttgtccctttttggcgagcttgtctcgcagcaaggcgtgcaagcacgccgccgaccggcgtatgacagtgaatcatgtcgtagccgttgtcctgaatgagccgtttcagccgcctgtaaacagaaagattttcgggatgaaacggcgagcgccggatcggaatggaaaacttttcatcaacgaacggaagattcatattgccgcctgccgcgacgtgcacctcccagcccatatcctgaaaccattgaaaatacggaagatgaaaggctttaaaatgataatcgacagtggcgcagaataatacttttttcgtcatctttctgtcctcccatcacacgcctgcggccgcttcttcatgtactgattcgatcgcctcaaacagcctttttctcagctcttcttcaggcagacggctgaattcctccataaaacggatgagcacggcccaattcccgtccaccgctttcccgatatggattttcggaaaaatctgctccgtatgtacttcattatgattcagcaattcttcatacatcttttctcccgggcggatgccggagaattcgatgggaatctgttctgtcgtatagcctgataaatgaatcaggtttttggccagatcgacgattttgacgggttctcccatatccagaacgaaaatctgccgcccttttgcaagcgccccggcctgaatgacgagtcttgacgcttcgggaatcgtcataaaatatcttgtcatcgccgggtgcgtgacggtgacgggtccgcctttttcaatctgctttttgaaaatcggaatgacgctgccgcggcttccgagcacatttccgaaacggacggcggcgaatttggtgcggctgacctttccgaggttcatgatgaccatttccgcaaaccgtttcgtcgcgcccatgacattggccggattgaccgctttgtcagaagaaatcagcacgaaggtttccgttccgcacatgtcggcggcttcggcgacatttttcgtgccgataatgttgtttttaacggcttcttccggattatgttccattaacggcacatgtttatgggcagccgcatgatagacgacgtgcggctcgtattttttcatcaaagcaaagattttatctctgtcctgaatatcggcgatctccgcgtgaaagagcacctctttgccgaagcgtgcggacagctcggtatgtacggaatgaatgctgttctccccgtggccgagaaggacgatttcccgcggaagaaacgcgctgatctggcggcagatctcagaaccgattgagccgccggcgcccgtgaccagaatcgtttttcccttgatgctgtcagaaattttgctcgtatcaagggtgaccggctttctgccgagcagatcttcggcttttacatctctgatgtgtccggcagcctgcgttccgagcaggatctcgtcaaattgcggcatgattttaatatgggcgcccgtctgcacacattctttgtataacgtctgaagctcatgggtgcaaagagacggaatggcaatgataatatggtggattctcagcctctgcaccgccggcataatgctttcttttccgccgatgacgggcaggcccatgatttcgagcttatgcttcgtctgatcatcatcaataaaagccacaggcatgattccgagatcgtttttctgggtaagctgacggacgagcagcgtcccccccgcacctgcgccgatgatcagcgccctggaagagtcattttgcttcctgccgatcgtttctttcagcacccgtgaaatcatccggcttcctccgatgaacaatagctgaaccatccagctgacggccaacagccggaacaaaatcgtgtggaacaccccgtattggacggcggctgtcacagctgcggacagcgtgatacccttcagcagatcaagcagctcgcctattcccgtgtacgtccatacctgcttatactggtgaaacataaaagcgcatacatgatggctgatcagcatgctcacggcagtcagcagcaacgctccggagtcataaaagtgataagaatcctcaaaaaattgatatcctataacaacggaaagtaaaacgagatacgtatccaatgcaaaaatcattgaaagtcttctccggtaagtcaatctttcccctcctcatttatcggtttagctgatacggttttcgtaaaaacagacataacagctaagccgataacaatgcatcatcttaagataaaattgggcatttaacccgtcctcacaccccgccaccgacgaccagcatctaaggcggcgaaaaacgccgcccacagcagagccgagtgcctccgttgataaaggtaaggagacatcacctgcaccgctcaatacgagtagtgctccgtttttttgattttctttttattcagcagcgcccccaaaagctttgcctttgactgctggagcgcgtctctcgccttttggacggtatccattttcgtttttccgctcaagacgacgagaacgcttccatctgtctggttcgctaaaatctgtccgtccgccacagccaaaagcggaggtgaatcgaaaataaccagactgtaccggctgtacatctcctgaatcagctctcccatcgcctttgaagataaaagctcagccggattcggcggcgtcggcccgctcgttaagacgtaaaggttatcaatcagcgttttttgcaccgtttcgccgagggaagcgtttccgactaacacattcgtaaggccttgtacattttcaagctgataggtctcgtgtatcgtcggttttcgtaaatccgcatcgacgagcagcacctttttttcctgctgcgcaaataccgcggcaaggttggcggcgctgaatgattttccttctcccggaacggaagaagtgacgagaatagagcgcaaatgggtctgaacagaggagaactcaatatttgtccgaatggtgcggtattgttcagccaccaatgatttgtgatgtaaaacggatatttgagccagtccccttctagatttcttttttctgaatcccaaacgcctcactccccgaaatgtttttcatcagaccgtgtctgctgatttttgatgtcatacacaacccctaaaataggcaagtctgttttttcgctgagctgccgctcgcttttaacggtttcatcaagaaaatggagaaaaaacgcaagcgtcacacccgccatgagagccgcaccgaacgccatcatgatatttcggatgcgcgaaggcttgaccatcgggctttccgatgcttttgcctcagacaaaacaatgacgccttttatattcatcctgtcacggacttcttttttaaatgtcttcatcagcgtgttcgctatagcggcggcctgtttcggattctcgtcctgcaccgctacggtaatgatctctgaatcggtttcgctgcttgtcgtgatctttgcttttaaagcggatgccatctcagaaagatgcagcgtctgcttcactttctcaagcactaccgggcttttcattatcgtttgaaacgtattgttgtaatgaagattcagctgaacgtcgctgagattcgaatttttttcaccgcttgtttcatgaatgagcacttgggtcgatgactgataaacgggcgaaatcacccggaattggatgtatcccgtcaccagcgttacaactgctgtcatgataaaaatcagtaaaaatctgtgtttaataatgtcaaataattctttgaaactcatattctcattcatgtaattacagcctcatccttattgcatcaggcttaaacgcccccttctgttaatgattggattataaaagaaaaggtcgaaatttgaaaatttcaaattaagccatttagttctttttaaagaacattatcatgattttcctcttatttactgcacttaccttataattttaaattttataaagaacgaaagatttcttataatgaacaaaaaaatgccagtatacaggggagaattcagcacaatgattggaagaataattcgtttataccgcagaagaaaaggctactctattaatcagctagcagttgaagcaggtgtctctaaatcttatttaagcaagatagaacggggggttcactcaaatccgtccatccaatttctgaaaaaagtatccgccaccctgcaggtcgatctgacggagctttttgatgccgaaacgatgctgcatcacatgggaggcacggaagatgagtggcgcatccaccttgtgcaggccgtgcagtcaggcatgccgaaagaagaactgttcacctttacgaacaaattgactgaaaaacgcccggagcccgcaccctaccgcaacagaaaactgactgaatccaacattgaggaatggaaagcgctgatgcaggaagccaaagaactcggcttgtccgttcaggaagtcagatcatttttagaacggaagcgttactaatgatatgctgatgaaaaggcttttattcgcttcatgtcttcatctctgtttataatgaaaagaaaaaaggggatgaaatcatgacaaaacttaccgttcaaacccgctccggcgcaatgaaaggaactgccggccgcggtgcccgcacatggaagggcataccgtacgccaagccgcccgtcggagagctcagatttaaagcgccggagccgcccgcaccttgggacggcgtaaaacatgccgattcgttcggatcggtttgtccgcagccggatgatatgctgtctatatcgttttccggagatgtaccgcctcaatctgaagattgcctttacctcaatgttttcgcccccgattcagagggcgaaaaaaagcctgtcatggtatggatacacggcggggcattttatttaggtgccggaagcgaaccgctttacgacggatctgcccttgccgctgacggagatgtcattgtagtgacactcaattacaggctcggaccgttcggctttttacatttgtcttctattcatgacgcgtattccgccaatatcgggctgctcgatcagatcgccgccctgcgctgggtgagggacaatatctccgaatttggaggagacccggataacgtcacgatatttggtgaatcggcaggcggcatgagcatcgcctcccttatggcaatgcctgacgcaaaaggcctgtttcataaagccattttagaaagcggcgcctctcatacgatcccggcggacatggcaaaagacatcgcggcggcatttattcatgaagccggcactgatcaattgcaggagctttccgttaatgacctgcttaagactgcggataaagtgcggcgctcactagatcaaaacatttttcagcttttgtttcagcccgccatcgatccggccacattgcctgcggaaccggtgaaagccatagcagacggggccgcagaaggcatacctatgatcatcggaaccaatcgtgatgaagcatatttgtttttcacccctgatacagacattcattccgagaaaaagcagcaagattatttgcattattacctcggagagaactgcaccgagcaagcagcagatttatatccgcattcattaaagggacaaatcgatatgatgacggatctgattttctggcggccggctgtcgctttcgcacaaggacagtcgcagcacgcaccggtctggatgtaccgctttgattggcatggcgaaacaccgccgtttcataaagccgttcacgctctggaattgccgtttgtgttcggaaactttgattctttgagaaagacgctgcaagaaccgctcggtgatgacgcagaacagctttccaaacaaatccaatccgcatggctcgcttttgcaaaaaccggaaacccgaacacctctcacttcaattggcctgaatatgataccgattcacgcgaaactttgcttttcaacacggataccgctgtcgaaagtgatcccgattcagcaaaacgccgcatcctgtttcaagcataaaaaacgccaagggagccggctcccttggcgtttcgttttcatctcacttcataatgcaactccgcaaattgcttatagcgcctgacatcagtcagcttcagtcctgtctcccggtctccgggtttgaacaaagaaattccgcgtccgagcagaacgggggcgatctgaatgataaactcatcgacaagtttttcctccaaaaccgggtgcagcagatcactcccgccgacaatccaaatccgctcgccttctcggcgtttcaatgcttttataaaatcggcaggctcttcatgaataaaccgcacatgttcagtgcccccggtcaatgtccgcgaaaacacatagcattctttacctttgtacggaaattcctcaggcaataaaaccaatatttcctcgtatgtttttctgcccatgatgatcgtatcgacagattcatagaaagcttcataatcggtgctgtcttctccttcagttccgattaaccaatctaaagaatgattttcccgcgcaagatagccatctgcgctgacagctccgtaaaaaacgagctttctttgaccgctcataaaaatccctcccccttttttattataccttaaacatgcgggtgaaatgaaaaatgatagaatcgggtaaaaaccgccgttaccgggttttcgtttcttcctgctttggagatgctgttaatatgccgtctatccatcttccggtaatcggcataaagaaatggagaatgacccctcctaaacaaacggttaataacgttccgatgcctaccggaccttttagcatcacggccagtatgaaaaatatgaagtaaatgaccgttcttgaaaaaaagatgcttctcccggttaattcgcggacaattagcgttaaccgatcaaccgggatcggtgcgaaatttgtgtgcaggtaggttgcggttcctatccctatcacaactaaaccgattgcaaaacagcccgcttttccgtaccatagttcaggcgttatgactcgatgcagaaaaaaaagccacatatcaatcccgattcccgttatgaacgccgtaatcatccctgaaaattccggcctttgcctttttaacattgaattacagcaaattaacaggaaagcgatgatgatttcccagcttcccacggtaagccctgcatggacggataatcccacaataagcgcatcaaaaggagacgttccaagatctgattgaatcgtgacagaaataccaaaggtcaagatcatgattcctaaaacataaaaaacatatttcactttatcgtcctcattttcttattttatgttgcaaatacaacaaaaatacggtatgtttactatacggtattttcattgcaaatacaacaaaaaaaatcagctgatatgataaatgaagaaaggagctgtatgaccatgagaattcaattaaaaaagtgcagccttaacgatataacagagctccgggagataagcattgaaacattcaatgatacatttaaggatcaaaattcaccagaaaatatgaaagcttatttggaaaatgcattccgctctgaacagctgaaaaaggaattatccaatctgtcttctcaattctattttgtttattatcatgatgaccttgcggggtatgtaaaagttaacatgaacgaagcacaatcagaaaaaatgggtgaagattctcttgagattgagagaatttatataagaaaaaaccaccagaaacacgggcttggcaaatatctgctgaatgaagctgtgaaaatcgcaacagcacacaataaaaagaaaatctggctgggcgtatgggaaaaaaacgaaaatgcaatcgccttttatcaaaaaatggggtttgtccaaaccggagaacactctttttatatgggggatgataaacaagtcgactttatcatgaccaaaaccctgtcgtaaaaggatacaaaaaacccggccaagctaccgggttttttctcttattttaattttcccgcacggatatcatcggtcattccttcgtacggcgcttctgaaatcaatgtttcgttattgattcccgcattgttgagatacgtaatatccgcaaactcgggaacgacatatttcgggtacgtttcatatttctcacgtgactctttcatcacgtcaatgtaatcattttggtagcacaccgtgatttccggatgctcatgcacccatttcgggaagaaaataattccgtgcatccgtttttcattcggcataaagtttaaggaaacatctgtgcctgtcggttcagtccatgacactttgtatacgccttctgtcagcttgacgatattcacttcctggtcgcgcacccagcggccgcctaccattccgctatgaatccgatagtcgatcgtatgatcatttttaatatagatttcatactcccagccgttttcatacgtgtaaatcatatggcttccgataaagttttccatgttgactcactctccatcttattattgaacttcataaatatctaaccgaatgtcatccggccatctgatcgcagccccgataaacagccggtcctgcagatgctgatatgcctcgctgcttgtttcaaacataggcacagtgcggaaatacgcgtgctcgggatcaatgatgcggttcactgaatccattgatgacttttttaaagaaggttcattcaagacgtatcacctcccgaggtattatgttcacctaaacatgtaactatttacacatttaattgtaacgctgttaaaatggactgtcaaataatgagctgcctctgataaagtttacccggaaaaagaggtgttcaacaaaaaagacaagggaggcacatgccgcaacccttgtctttttcgtttagtgtaaattcattaccgcttcatacaccatatgcagctcgcgcactagaaagatggttcgcgatatcctagcaataaaacaaaattagctcagctcgattgagctggctaatttatcttgtacaaagcttatctttacattcttctttgggttcggcatcaaccgtatacgacaatatttctttattgcctggatcatatagaccttcaaactctttttttccattcgtataacccttaatactaataccacccattggattaatatggtaatcctcagaaaaatggatattatccacatttttatagttcgttgttaaaaacttttccatatgattctgggcttcttcgaataacgcaatctctttttccttttgatcatactgatgcttcataaaaagtcccccaactgctataattattaaaataaggataattatgtaatttttctttttcatttggaaatcaaccctttcctataaataactgtcgttcttaagtaaacgaaatgagcgattacttgatatgaatatactttcagcatgtcaaaagcaaagctaaccaattcagaattcatcgcgattgttgctgacaagttaagattggaacttaaagcgagtaaaatgctgatctgacgttttcctgtcgttgagttgtcatgatatttgtacgcgtttaccgttaatatcggggatacctcgacaaatgagacggtagaggcgattgatctcaggaataggtttgaactgtatgagaaacatatcacgaattttgtaagataattaaacaaaataaatacccactcatcctgaggtgggtattttacctttcttcggcattgaccactgaaatacctatctccttgttcgttggatcatatataccggaaaattctttttctttattattatttatgtagcctgaaacttcaactccgcctgtcggatcgatattgtagtcttttgaaaaatgaacttcctgtacatttttatagtctttttttaagtaattcctcatatgatcttgcgcctcaatcacaagtttttcttcgtttttatgtttatcatattgatgcttcacgaaaaaacctcccactgctataattataacaattaggataataatgtattttctcatgcgtatcatcctttcggaactattttacaatataagaaaggtgatgtatatatgccaaaaggaaaagaaataaccgtctctaatgtcacagataaagaatattaccgtttgagtcaagcagcttaccattataaaatgttagccctgcatatgaaatataaaactccttataaaataagtaagacgtcatattggtacgttgagaaagtgaagcaggattctgatacgggtcttgatgcctttgtattctcaaaaggcatcaagtccaaaaacggtaaatggacaaaatcaaaaaaccccgaaaacgtggtcgtcgccttcgcaggcactgatatcgcaaaagacccgatcaatgacggcgtaaaagcggacggcggcaatattgttttcggaaatgatccgaaaacagaagtacattatattgtaaaaaaagacgcaaaggatacgtcgaaaacacttggaacctatcacggaacgccctctcaagacgccatgctcacaaccggaaagtataagctgatgacgaaaacttcgcaaatcgatcaagccgatcagctggtacgcagcgtaaagaaaaagtatgccggaacgtcaacgattatttcaacaaccggccattcacttggcggcgctgaggccgaatacagcgcggtgaataataatgtgtatgccgtcgcgtttaacagtccttccgtcgtgaaactgcacgatgaggaaacacagaaagagatcaacagcggcatttacgatccttacatccggtcaattatcaatccggacgacatggtcggggcaggttattggaacgaatatgaccgccacaacgggacaacaatttatacgaaaaacccctcgctctcacagttcagccgaaaccagcggcttgatgggaaattgagcgagcagatcggaaaaaatctcgcttatttcttcactactgtcattctgagaaatccggatacacacggcttaaacgaagcaaatttcgtgttcgacagaaacggaactatcgcaaatccgaacggagatgaattagtctttgacaaaaacctcggcgctcttctgccggccggtgcgatcggaagcggcgacgcgataaaagtaacgccgacaaacgcaaagaagctggctgaaaaggtgcaggctatgactgaggatttgcggacgatgaaaaaagaagcgcagaacgcctatcaggagcacgatgaaaaaatcgccgagctgaaaacggaattctacggtcaagtcggatacggcttgtatgatcagcttcaagcacaggacgtgaccaataccattgaagatattgcgctatcttacgataaaggcccgattttttatgacactcaggctgagcaggcgtttattgattctttgcaggcggcgatcacggatcttgaagagatcggcggattcttacataaaatagcagacgaatttcaggaaaaagaccagatgctcgcaaactggttaagatgatagaggtgtatacataatgccgacattagacgaacttttagaacacaaggacgacccgatgaagaaaatgctgcagcggcagatgctgaaaacagggatgacgcaggcagcggggatgaaactggaaacagtccgccgaacgctgaaaccgacattcgaaatggatacgttgaaagatgaattatatgaagtgtattcagcactcttgaacagctttgaaggcaaggcgcaaaaagctctcgcacagcggatcagtgaaagtgccaagcttattgttaatgtggagaacgacggagaaactttcgttaatagctttaaaacgagataaaaagcccctctgcaaagcaagttaagtatgaaatgaacgaaaataataaagatgcgattatcgagtcattaaagcggaaagttaagcgactagagcatgagaacaaagattttagaaacccaattaaaagtagcgtatgcagaagtctacaaaaagttctagttgacaaggtatttattatttaacaatcaagattgtttaggaatctcgtatattaaactcaaaagttatttgactaaagataagagggtataaaaatggataatgaaacagccaaaaatattagagaaagtttaacggctgattgtacgaagtgctttggactttgctgcacagcgcttaatattgtagcatcaagcgattttccaattaacaagccagcaggtgcaccttgtgttaatttacaatctgattatggttgtcaaattcacagcaacttacaagagaaaggttttaagggctgtacagtgtttgactgtttaggttctggacaagttgtttctcaaattacttttaaaggtcaaagttggcgagataatcctgaaattcgagaaaaaatgttccgagtgtttccgatcatggaacaaatacatgaaatgattgcgtacacggcagaagccttgtcgtatgatattccccatgctttgtctgataaattgagtgtgcagttaaaagaattgcagaacttaacaaaactcgatgctgaagaattattatctcttgatctagtggtgtacagatttccattaaacaaattgctttcggaaaccagcgagtatattagggaaagcttaatttcaaagttacctgacactaaaaatgccaagaattataattacgaaagagccgattggattggcaaaaaattaagaggtaaagatttaagggcattagatttaaggggagcatatttaattgctgcagatatgaggaatgcagatttaagaggtgttgattttattggcgctgatttgcgtgatgctgatttaaggggagcagacttatctacgagtatgtttttaactcaaatgcaaattaattcggctaaaggtgatgtaaagacaacattcccctctcatatacaacgaccttcccattggattaactaattttgttcagtttgtgtattgaaggaaactttttgaagatggtcttactatcagtcttaggaaagcacatattagtcatgaataatatatgctttatgctttcctttatttttgaggatttttataatttaggtcatgataatactgtgccatccggtatctgtagcatgtggagttcggggaatttagctttccgatataatagacgtaggctaggacgttctttctttcggatttatttccgctggatggcgttcttttttttgtttttaaatgtaaggaacgtatatcgctgccgtttcttaaataattaatcgcaaaggtatgtcgtaagctatgaaggctcggtcggcattccttttttaaatccgccatttccccgtacttcgcagctctcttccgcaagtgatctttcgcaatcttctctccgtactgattaacgaagacatgcgtaaatttaccgaaatactccgtcatttccgttagtaattgccgcaactcttccgcgacctgttcagtcatcggtaccattctgttcttacggttcttgttgacggcgcccggcagcatgataacgaggttgtcaaagtcgatgtcttccggcttaagtccttcaagctcattcgaacgaagcccacattttaacgcaatgaggaacgctacataatcgcgaaagcctgggaacgtatccttctcgatcattttaaagaatcgccgtacctggatatctgtgagcatcttaatcgtcttttcatcgacccgcagcttcgttactcttttcgctggattttcgtttagaagcccgcgcttagtcattcggctaaggatcgactttatgccgcctaaacggatatttatcgttactggcgaaagatcgcgtacgttgaacatcgttgatatataggaccgcagatgatcttccgtaatgttcgttacgttatccgtcggctgtatgccgaccacttccataaattccgcccaatacttccgataattattgatcgttctgtcgcgatagttctccgtttcaaatagctcgcatacgatccctaacgcttcgtgaacggatttcgtcgctttgaagctctttactattccgtcagtctcgcgccgatccctgacgccttgcctgcgttttaaaaccgccataacaaaaaacctcccggatttatttatccgcgaggttacgtttgctgaatcgaactatatcgttttaagagatacgagccagccgattaaagccgggcccgttctttaccggttcgcgtcctgtcggacacttttcgtacacttgacgccttaacggaccgtcggaaagcgttgatatgacggggttaaaacgtattggacgcgctcggagggattcgaacccccgacagacgtggtaccggaaaccaccgctctatccaactgagctacgagcgcacgttttttcaatcagatacctttatattataataaaggaacgcgcagaaagcaactcttttttgataatgcacaacaggattatgcagcgtcctcatgcagcataatcctgcatcgtttaccggcattgattttcacaaaaaacccatttcaggcggactgcccccggctcggttcattttcaatcactgcagaaaaagcagtaatcacccgtttcagcttcttttccaaatgtcctttaacgtccaataggtgaattcctcaacctttacggcgcctttctcagaaaacagctcaatccccaatctgccttcattcggatagatacggcttgtcatcgttgtttctccatgattggcgaatacttcaatcgaggatctgtcaataaagatacgcagcgccagcttgccgtttgtatccgtctgcacccttctcacaccgtctttcgctttccccatcttggtgcaatcaagtgtcagctttttatccgttagattgtatgtcagcacaagttcttcttcatcaaggcctcgaatcttaaaacctgccgtttcggcatcagaatcgtttacatcaaacacggctcggacttcaagcaggtcttcggacgtctttgccaagtaactccctgaaagcgatcgtccggcacattcccgatattccattttccgcagctgcttggtttcttccacgggattcatcaaaagtttatgatcatcacgcaaagtcagttctcgcggcaaagtcagtgcaccgcaccatccgtccgcttttgtcggcatctcagattcccacatatccatccagccgatggcaattctgcgtcctttatcatctaataatgtttgcacggcgtaaaagtcatggccgtgatccagttctttaaaagcgccgtgtgtaaatttgtttgtttcatcatgatagtcaccgattaaatagccggtttgatgtaaattttgataggaatcaccgtccgcctcgataccctggggcgaaatcagcagaacatgtttgccgcctaattcaaagaaatcaggacattcccacatatagccgagattaccgtcactttgggcgagaacccccgcgtattcccaatcacgcaaatcaggtgaacggtataaaacgacccgtccgacgttttcttttgaagagttgccgatgaccatataccaaacatcgcgatgcttccatactttcggatcgcggaaatgacgggcgctgtcttccggcggttccgcaataacagggtttttctgaagcttttcaaacacgattccatcttggctgacagcgatattttgagtttgatagaataggtctttctcttgatcaattatattatgtcctgtatagatgagggctaatcttccatgatcatcgaccgcgcttcccgaaaaacagccgctttggtcgaattcatcccccggagctaaggcaaccggaaggtgctcccaatgaatgagatctttactttttacatgtccccaatgcatcggcccccaatgctcatcatacggatgatgctgaaaaaagacgtggtattctcctttaaactgaataagcccgttcggatcattgatccaattcgcccggggcataatatggtaccccaatcgatatctttgtttcactttaccctcggcttccttcaaagcttcttccgcctgctgaattctatccatttataacatcctctctatccgattttttgcagacgctggacacgcctgctgttttgtttcgggcccaataaagtaaatatggagatgacggtaaaaccgaagacgacgattcccatgatgagataggtttgacggaaccccgcactgtcatataaccctcccgcaagcggcgacagaatcgacgcgcctgcctgagatgcgaattgaaaaccgacgagataaaggacggacgacagacgcgtatcaaaattggcagccaaatatttaaaaacggcgatcagcataatcggcaattccagtgcgtggatgagtttcattgatgaaatgcctacaggctcaactgcaattccggacccgacgatgcggaaagccattaagaaccccgctaaaatcaaactgtttttcgccccgaacttattgacgataaaaggcgcaagaaacatcatgccggcctccaaaaacacctggaatgaattaagatagccgaatacttggttacccgtcgacactgaaggaaacaaagacgcatagtagatcgggaactgctgatcatatacgccgtaaatgcaagtcaccccgataatgtacagcataaaaaaccagaaatctcttagtaaaaagagccgccccacatcttttaaccggaccgaatccgctctgtttttctcatgatcggtcatttctattttcacagacatgataatgaccgttaatatgatggctgaaacagacgcgatccagaagttgatattgggattgatattgaaaagctgccctgcaaaaaatgcagccgccgcccagcccagcgagccccacattcttgatttaccatactcgaaatcatattttcggctgaccttttcaatgtacgtttcaatcgcgcctatccccgccaaaaaagcggctcccaaatataagcctccgacaacggcgccaagaaagacgttgtattgtaaaagcggcccatagacgaagatataaaacggacccgtgaatatgagaagacagctgatcataaataatatctttttcttcagccccaatttgtcagagataaaaccgtaaagaggctgcatgcatagggcaaatacggcgtttacagaaaagataatgcctgtcgctgatccgtttaaattgatttcctgccctaaccaaatcgcaaataaagaatagctggaagaccaagtaaaaaagaaaaagaagaaataagcactcagtttccaatacagactttttgagcttttcatttgcaccgctcctttaagaggaccttttaatagccgttttagagccgcatacttccttcttcattttcatcacatacatgcgagccctgagtaagcgcttactttctatcgctgcttaattctttcactttattgccgccagccatctctccatacccgtcacttcccttcactctgcgaataaagcgctttcaaaaagaattgtatgtcaaccggttccatatgtcaatcggttgacatacaattttctgattattttaatcaaacaaaacgcaccctctttatatgaaaacagaaacacggaatgtccttgcacatgtcagcctgattctctaaaataagtgcgtgacggaaattgtaagccatttcagtaagcaggagggcacgggaatgaagcctaacattcatgatgttgcgaaaatagcgggagtttcatctacaaccgtttcgcgggtattaaataaccgcggctatatcagcgaaaaaacaaaagaaaaagtgtacaaggcgatggaagaaatcaattactttccaaacgatctggcccgctctttattccgaaaacgaaccaatttaatagggcttatcatcccaaactccagcaatccgtttttcggcgaactcgcctttcatattgaaagcatttgtacgtccatgggctacaaactgctgctttgcaacagtttacatcgaaaggataaggaagaaaaatatttggagatgctgataagaaaccaagtggacggcgtgatcgccgtgacttacaaccggggaattctcaattatcacaagcaaaatctgccgattgtcgccattgatcattacttatcggacacgattcccgtcgtcggctcagacaactatgacggcggaaaaaaggcggcagaactgctgattgaaaaagggtgccggcacatcgtccatctcaacggcccgcttgaactcgagacaccggcaaacctcagaagaaaggcatacgaagacgtcatgcatgaacactgccggaagcctattacatatgaagtacccttttatcagcattaccatgacattatttcaacattattcgatgaacagcctgacaccgatggaatttttgccagcgatgatatcatggcggctgcagtgatgaccgaggccaaaaaacggggaatagacatcccgaatcaattaaaagtgatcggttatgacggcactgaaaccgttcaatcggttctgccggacttggcaaccatccagcagccgattgaattgatttccaaaacagccatcgagattttagcaaaagaaattgaaggcgaatttgatgatttgccgctggaaacatatttgccggtacggcttttggaagggcggacaacgtagtcagaccgttcagccgtacgtagcgacgcgattgcggtctattttgagcgctccggccatatcattttctcaaggctccggcattgatcatcctcatttccactttgctgtttgaactttttgttttatgggaaaaatggtgttagaagaaaaggttggcattttggtcagcgttttgtttgacctttattgaccaaaaatgtatcatgtaaatacatacttacctaaaaggtgaaggaggagcattatgaatttaatacctacagtcattgaacaaacgaaccgcggagaaagagcttatgacatttactcccgtcttttgaaggaccgtattatcatgcttggatctgcgattgatgacaacgttgcgaactccatcgtgtcacagcttttattccttgaagcggaagaccctgaaaaagatatttccatttatattaacagccctggcggatcaatcactgccggcatggcaatctatgatacaatgcagttcattaaaccgaaagtatccacgatctgcatcggtatggccgcttctatgggagcatttttacttgcagccggagaaaaaggcaaacgttacgcgcttcctaacagtgaagttatgattcaccagccgcttggcggagcgcaaggacaggcgacagaaattgaaatcgcggcaaaacgcattctcttgcttcgcgacaaattaaacaaagtgcttgctgaacgtaccggccagccgcttgaagtcattgagcgcgatacagaccgcgacaacttcaaatcagctgatgaagccttagaatacggcttaatcgataaagtgctgacacgcaatacagaagaccagaagtaatgcccaaaaacctgcaagagatgatgtctcttgcaggttttttatgctttattcccattcaagaaagtaatgaatgctttgacgacagataattctaacgctgaagaatcatacataagccaagtatcgcgtatcacaggctcgttatttttataggatagcgccaatgtgtatagttcatcagaaggctgaagacagatttccggcacaacagaataaccgagaccgtttttcaccatctctttacaggtttcctgcctgtctacctccatcgcaatgaaaggcggttcagtaaattggttattccaccatttttgaatcaaacttttcaaagaagcatcagtttgataataaatcatcggcaatttgggaaggtcctcactgttgatttcagtttttgaaataaggtacagtctctcttcatttagcagttgttttttcccttgccaatcataatctcccctcataatcccaaggtgtacccccgaatgatgaagcagatccatcaccttcgcactccatcccgtattgacgtggaattgaacagacggatactgatcagaaaaccgttttagaatcgccgggagcttatactgagcaaaattgcttgagactcctaatctgagaaccccgctgacttcatggctcatattgagcatatcatccttcactcttctgaattcctgcagcatctctttcgaataatcaaccagatgttcaccttctgaagtgaactccatccctttttttcttttataaaaaaggcgcactccgaattgtgcttccaggtttttgagccgataacttaacgccggctgtgtcatatataatcgctctgccgccttcgtcatatttttttcttcgaataatgtaatgagcacaatccaatccttttcatccatatgaaatcccccaaaatatttttctgctataaaatttcctcctattataaaagttttttattcaactttataaaaattatatgttttacttataatccttatttatcatacgatattttccaaagggaccggtacctttttatccacacaaaatgatgtaaggatgagacagcatggaaaaagttcctgtaaccgtcatgagaggcggcaccagcaaaggcgtttttattcatcaaaaagacatgccagacgatacaaacctatggagcgattttcttttagacatcatggggagccctgacgagagacaaattgacggtctcggcggcggccattctctcacaagcaaggcagccattattaagaaatccgccagaaaggatgcggatgttgagtatacgtttgctcaggtcagtttgactgaccattttacggacttcaaaggcaattgcggaaatatctcttctgccgtaggcccttatgctattgagaaagggctcgttcaagctgaagagccggttacaaaagtcagaatgttaaatacaaacactcaaaaagtgatcgtagcagaagttgaagtcagaaatggaacatttcattaccagggggactgctctatccccggggttccaggtacagcttctcctatttatctttcatttcaccaggctgaaggagcggtgaccggtaagctgtttcccactggtcagcctattgatgttctcgatacaccgtatggaaatatctcggtctcgattattgattacgctaatccgcttgtctttgtaaaagcagaggacacggggcttaccggcttagaacttccggatgaatatactccggatatattggaaaagctcgaaatgatccgatcgattgcagccgagaaatgcagattcgcttcaagacatgaggctgctgcaaaatcaccggccgtaccaaaactaacattaatctcatctccagcggattatatcgatacaaaagggataaagagacatgcagaagagatggatcttgtcattcgtatgatgtccatgcaaaaaccgcatcaagctttagccattacaggggcggtttgtacgactgccggtatgctattgcaggatacaatattatctgaattttcattctatggcagaacgattcgattgggacatccaagcggcattttagaatccgaggcagatgttgattcggatggaacaacgattaaagtagtacgcacagcaagaaaaatctctgaaggctatgtgtttacaaagcaaagttacaacctgaatacgctgaatcacattggttaataccagtcttcagacaagtcaaagataaacggaggaatgcgagatgatcaatgtaaatgcgtctaatcgattaaacagactgcctttttcaagggcccatcaagcagtgctcgttatcctttcattcgcttacttttttgattttatcgatttaaatacgttttcatatgcggcgccttcacttttaaaggaatggaacatttcgactcataccatcgcttttattacgtctgtctcctatttcggaatgtttatcggcgcctctgccggaggatggttttcagaccgtttcggaaggaaaaaaggtttaattctggttgtcacttttttctctttcttctccctcctctcttctctggcttggaacccagaaatactcggtgtttttagatttcttacgagtttaggtatcggcgccacaacgattgtggcaagtacgtatatcagcgaatttttcccatccgcaactaagggtaagtaccaggcaatctgtattacaatcggcatatgcggaattcctgcagccggctgggtggctaaattggtcgtgccgtccgcctcttacggctggcggtttatctttctattcggcgcggtcggtattttttttccgctgatcgccagaaaactggaagaatcaccgaaatggctggacacgaaaggaaaaagcgaacaagcacaccgcattctgcttgaactggaggcaaaagcagaaaaagaaaagggtgaactgcctgaaccagctccggctctgcgaagcagacaaaccgctgtaaaatccgttccatatcggacgttatttcaaaagcctttggcaggaagaacttttgttttaatgacgatgtgggcagcttccacgattgcaattcaaggctttggcacgtgggttcccacccttttggtaaaagaaggcgtatcaatggatgagtctatcgtatacgtcactctgggaacgatcggtgccccgctgggcgctctcattgcctcgcaaatctctgaccgtgtggatcgaaagtgggccatttctgttttatcgttaattattatggcgcttggattcttttacggcatcaatcctttaccgatggtcattgtcatatgcggatttctcatgcatatgtttgagcgtactttcagttcgatcgcatatgcctatacgccggaattatatccggttgaagccagggcctctggaaatggtctcacttacggcgtaggacgtcttgcgaatgtagccggtccctttgtcgtcagtttcctgtattcaggctacggatttttaagtgtattcttgttttttacaggctgctggtttctttgtgcactgacagtcggtatatttggaatcagttcaaaaaaacaaaagatgcagcaggatgatttcatatcggaggaaacattcgtgcaacaaaagttgtaaacgcatacagtatgcaaaccgcaaaacatccatctcctctgaggaaatggatgttcttcttttaaccccaacagcattctctttctcatcttattctcatacatatgtcttatcatgaagaaaggtgtgatacgcatgagaaagagaaaacgatttccagaaagaaaaggtattctataggcggagaattttccatcagaatagattagatgcaaccgccgaaacatatttcagacctctgccttacaattcccgccatttcttatctaaaatcgggtatatataccgattcatctgctcaatcagctcatccggccgggaggaactgtggatcagcttcaaatgagactcattcgaaaatccttcctgaatgctgtacttgaccatcttcatcatcggctcaaaatacccgttcacattgtacagtccgatcggtttttgatgaatgccgatttgcgcccagcatagcacttcaaataactcttcatatgttccgaagccgccgggcatggcaatgtacccatcggcaagttcactcattttcgctttccgctcatgcatgccgctgacttcaatcagctccgtcagattctgatgaacaacctccccgctgaacagcccgctcggcatgacgccgacagcttttccgccgcctgccattaacgcgtcggcgacggttcccatcagaccgacccgtgaaccgccgtaaacaaggccgattccctgctccgccatatattcacccagttcggccgctttgcgtttgtactcttcatttacccccgggtttgaccccgcaaatacacaaatggttttcattttttcatctccatatctatatatgtacatcaataaatcaaaatacactatatattgtcccatctctatatgataatatcaataagaatcatacaggacataaggagtgtttcacatgcagatggctgaagcagaacaatggacgaaagatttttatgaaaaacgaggatggacggcgtacgggccatttatcagaatcggttttttaatggaagaggcgggtgagctcgcccgagcggtaagagcatatgaaatcggcagagaccggccggatgaaaaggacgcgacccaggctgagcgcaggcaggagctgattgaagaaatgggtgacgtcctcggaaatctggccatccttgctgataagtacggtatcacgttagaagatgcgatgaaagcccatcaggaaaaactgatcaagcgctttgaaaccgaataaaaacacggcctgtccgctttttcatggacaggccgtatctgaattttatcccgttatctcgtcctgatgctcaaagaaatgctgtttcccgattttatgaaacagccccgtcttccggatcagctctctcggctgtgattgcaatccgacgatcatcaatctcccgttatgccgtttgatccggttcatcacattccccagcaccgcttctgcggaggtatccatgtaatgtacattattcatcagcagaataagcgtcttcggcttttcctgaagcctctccagcagcgatgattccagtgaatcaattgaaccgaaaaacagcggcccttcaatggaatatgtgctgacggacgaatcatttttaaccgatttgacagcggcatgcggtgttttgatgcttgttgattcgctcattttcctgataaagaaaacaaaagcgagcacgagaccggcagaaacgccgatgattaaatcaaacagaaccgtcagcaaaaaggttgccgccagtacgaatgaatcagtgtttttcagccgcatcatattggcgacttccctccgctcactcatgttccaagccacaaccatcaataccggcgccatgcttgccagcggtacgtgaacggcaagcggggcgaagacgagcaggacgaggaggacggtgactccgtggacaacaccggaaatcggagaaactgcgccgtttttaatatttgttgcggtccgcgcaatcgctcccgttgccggtataccgccgaaaagcggcgctgccatattggcgatgccctgcccgacaagctccctattgctgtcatgccgtgatcctttcatattgtccgcgaccatcgccgataatatggactcaagtccgccgagaagcgcaatgatcagagccgacggaaacatcatgatcatgttatcgattgagaaatcaggaagctggaaagccggaagctgccgcgggatttccccgtaagcagaaccgattgtcgccattttgtcaggaaaaaacacgaccgccgcggctgtagagacaagcagcgccacaagcgcgcccggaatcttcggcatcagcctggctgataacagcaaaatggccaaagcaattcccgcgatgaggatgctgtacaaattaaaggttccgatcttcttgccgatttccgcaatgttgaggataaagctttcatgcttttggatatcgcgcagaccgagaaaatgggcaatctgctccgagaaaatcagcaccgcgattccggccgtaaatccgacgatcaccggcttcggcacgaatttcataatctttccgagcttaaatacgccaaacaggacgagcatgacgcctgccataaaaccggctaccagtaaattctcaaaaccatactgcatcacaatggcaaataaaatgggaacaaacgcccccgtaggcccgccgatctgatatttagagccgcccaacagcgaaatcagaattccggccacaataacggtgtaaagcccgtattccggaccgacccccgaggcgatggcaaaggccattcccagtggaatcgctacaattcccaccacaattcccgcgattaggtctttctgaaatttctgcaaattgtatccctgatatctgccggtaaattgcatcgtcagctgcatcctcctttgactgtttcataaccgtcaacgactacatccagcgtccccgtccccggatcgatcaccagcccgtgcaccggcacctcttcaggcaagagcggatgatgcctgaccatattcacgctgtgggccacgctttcttcgacgctgtgaaaaccggtcagccatgtttccaaatcgactcccgcatgctgcagaaggctgagacatttgtcctccacgccgcgctctttcgctttatttaatatggaagccgcatttaatcccgacattccgcactcgcggtgacctatgatgcagacttcctctgcctgcagttcataaacggcaaccaaaatgctccgcatgacacttccaaatgggtgagaaacaatggctcccgcgttttttatgattttggcatcgccgtttctgagtcccatcgcctgcggcagaagctccgtcagccttgtatccatacaggatacgatgacaagcttttttttcgggaattttgtcgtttggtaaggttcatatttcctttcttggacaaactgctggttgtgctccaaaatgcttgataaagaaaccatttttctattcatctcccatccgattgtattgcaagccttcttacccagcttacagtaaggaattatagcacagaaaaaggactcaaaagcgctttcaaaaaaagacacgataatttgactgtaaattcagattatgttcatttatatctttcaaaaataataaaatttatctttacaccaacctataaagcttttgaaaacagcggttccgctcattttgccttcagaaatataggcggattctgttattgtttggagaaatcaagcatgtacatttctttttctttcattttaagttcaaaagaaccagaaatttatcgtaatacgtttgaatatttctcacgttaccgcttctcttatataataaaatagagaagaaagacaaaggaggagaagcccgttgaaaccctatgtattcatcgcgaaaccgataccgccggaagtcgaacaaatgataagcgagcattgccggtatgacatctggaaagaagataccattccaaaagaggaactgtacgaaaaaatgaaagatgctgaagggctgctgacatccggaacggcgattgacagtgatttactggatcacgcgccgaagctgaaggtcgtcagcaataattctgtcggctatgataattttaatattgaagaaatgaaaagacgcggggttgtcggcacgcatacgccgtacaccttagatgacactgtcgctgatctggctttttcattaatcctgtcttccgccagacgggttgccgaattggatcgattcgtccgcgccggcaaatggggaaccgttgaggaagaatctcttttcggtatggatgtccaccatcagacattaggaattatcggcatgggcagaatcggtgaacaagctgccaaacgggcaaaattcggcttcgatatggacgtgctgtattataaccgcagcagaaaaccggacgctgagaaggaactcgaggttacatatgccgacttagatacactgctgaaaacatcagactttgtgctgttaattacgccgcttactgacgaaacgtatcatatgatgggagagcgggaatttaaattgatgaaagatacggcatgtttcgtcaatatttcccggggaaagacggttgatgagaaagcgctcatccgcgcattgcaggagggctggataaaaggcgccggtttagatgtgtttgaaaaagagccgatcgccgaagacaatccgctcctgcagctggaaaacgtcacattgcttccgcatatcgggtcagcaacggcaaaaatccgcttgaatatgttcaagcaagccgcacaaaacatgattgacgccgtatacggaaaaacgccgaaaaacctcacgaaggaatttcaatgagatgaaaaatcccggccgtttcagccggggtttatttttttctagatcaaaagaaccatttttaaattctttctattcctttctctcgatgctgatacaatgaaaaggaatcagcttcacatgataaaaatgggaggtattgctttgaaaaaacgattatcgtggatttccgtttgtttgctggtgctgttctccgcggcggggatgctgttttccacggctgccaagacggatacatcttctcacaaggcgcacactgaagcacaggttatcaacacgtttgacggggttgcggattatcttcagacctatcataagcttcctgataattacattacaaagtcagaagcgcaggccctcggctgggtggcatcaaaggggaatcttgcagacgtcgctccggggaaaagcatcggcggagacatcttctcaaacagggaaggcaaactccctgccaaaagcggacggacgtggcgtgaagcggatattaactatacatcaggcttcagaaattcagaccggattctttactcaagcgactggctgatttataagacgacagatcattataaaacctttacgaaaatgagataaacacatacaaaaaacggcttccctgcggaggccgttttttttgcagagaacctgcgagcttcaaataaaatgagcagtaaatttttcttcaaactctgatcggtctattctgctattttccgccgtgccatcgtgtttttttattgttatattgcgttcagacagaaccatgtgcccttccggtgtccgcttagaagcaagcaggcgtttgttgaaaggagagcgttcatgttcaaagattgtttgtttcatagacttgagatccttttcatcgatttcttcaagcgaaaatgcgtaacctgtctgccagccgtcccctttgttcatttcaagcaggtatgtaccgaattccgtctcttctatcctcacgcggaacgctccggccgctgataccgtctcgtctcccgacatcggcacaggctgcatggcgagattgaggccgaagcctgcatcagcgatgtactcattccccccggcggaaagaagtacggccgcatgtgtgccgggcagcgcccagccgtttttccagaccgttccgcggatcaatttgacatcaaatccggcatctttcaggatgaaataaagcagtccgttcaagtcataacaaaggccgccatgaggttccttcaccatgtgccgccacagtccttctttcgtgacgtcatattcttttttggacaaaaccgcccgattttcaaacggaaaccgatatgcgagcgcctttaaaaactccggcaggttgctgaaattgagggaatccttttcccagcctatcgtttgataacaatctttcagaaactcattcatcgttccgtcccccttacaaagtgtttacacttcttcctgcacataagcggacaacttttccagcgcttccttttcatcgtcgccttcagcgatcagagtgacttccgtccccgtgctgaccgccagactcattaatcccataatgcttttggcattcactttcttgccgtttttctcaagaaacacatctgatgcaaaacgatttgcctcctgtacaaacaatgcagcgggacgcgcctgcaatcccgtctttaaacgcacttccactttcccctgaaccataagatctccccttttctgtacggttatttcaaagtgatgctttgtcctgtacgcagctgttctgcgatttcatcgagctttctcagcctgtgattgatgccggatttgctgattttcccgcttgcaaccatttcccccagttctttcagcgtgacctcctgataatcaatccgcagctgcgcaatttcgcgaagcttttccggcagcgcttcaagaccgatccgttcatcaatgtatttaatattttccacctgtctgagagaagcaccgatggttttgtttaagtttgctgtttcacaattgacgaggcggttcactgagtttctcatgtctctgacaatccgcacatcttcaaaacgcagcagtgaattgtgagcgccgatgacattcagaaattcagtgattttttccgcctcttttaaatacgtaatatagccttttttccgttcaagcgttttgctgttcagatgaaattcattcagcagcgcgcataatgaatcgttatgttccttataaagcgagaagatttccaagtggtacgacgatgtttcgggattattcacagatccccccgccaaaaacgcccctctcatataagaacgtttgcagcagcgtttcgccaccagttcctcagaaatattccgttcaaatacaaagttctctccgaggattttcaattcctctaaaatcagctttgcattttcagaaaagcgcacaatataaacattgttttttttcagccgcattttttttctgactaacagttcgaccgatacatcatattgtttcttcagcaatgtataaatgcggcgggcaatcgccgcattttcggtttgaacgtcaagcacgagatggcggtttgaaaatgacagggaaccgttcattcgaatcagcgcggacagctccgccttggcgcagcagtccttcacttccagattcgtcagttctttttttgtttccgatgcaaatgacatattagccacctcatttcaaaaggcctctagtcccttaataaatcgacaagaagagaagccactttatgtgtatcgtgacggattacgccatttttatacgtgataatctgatccctgatgacctcaagccccatggatttcagcttttcaacattgaagtcgacgggccgggccagctctttcgcatatttgcttttgatttcgtcagggatctcctcattgttgattaagatcgtgtcgataaacggctgctccatatgatcgttcagcgccttgacatggtcggccgcactgtattgcagcgtctcgccgggctgtgtcatgacgttgcatatatatacttttttggccgcagccttgacgacttcttctccgattttcggcacgagcagattcggaagaatgcttgtgtacaggcttcccgggccgataatgattaaatcggcctgacggatgacgtcaatcgtttccgggagcggatcaattttttcaggcgtaagaaacacccgtttaatccgctggccgtaagaagggattgtagattctccggagacgacctgcccgtcctccatttcagcgtgaagaacgacactggtgttggcagccggcagcactctgccgcggacattcagcaccttgctcatttcggtgacagcgtgaaagaaatcaccggttatatttgtcatcgctgccaaaatcaaattgccgagcgaatgtccggttaagtcgcttcctttgttgaaacggtgctgaaacagattttcaacgagcggctcaacatctgacaaagcggccagtacgttacgaatgtcacccggcggcggaatttgaagttcatcccgcagacggcctgaacttccgccgtcatcagcaactgtcacaatcgccgtaatatcaacgggcttatgctttaacccccgaagcagcacggacagacccgttccgccgccgaagattgcgattttcggcttcttattcatttccggcttctcttttcaatgtcccggtgggtgacatgagtatagaaatcttttttaaaatagtcagccaaatattcagcgagcgtgacggagcggtgctggccgcccgtacagccgatcgcgatgacaagctggcttttaccttcccgcttataagacggaagcataaagccgagcagatcaacaagcttttcaataaacttttgtgtttcgttccacttcatcacataggatgacacttcctcatctttccccgtaagcggcctcatgctttcaatgtagaacggattcggcagaaaccttacatcaaacaccaggtcggcatctatcggaagcccgtatttgaacccgaatgacattacgttcactgtaaatgtttcaccttggttcgtggcgaaatgcgccacgattttttcacgcagatcacgcggtttcatatccgatgtgtcatagatcagctgagagcgccctttcaattcttcaagcagctggcgttccagcgcgattccttcaagaggaagcccggtagcggccagcgggtgagaacgcctcgtttctttgtatctcgtcacaaggatggaatccttagcgtctaaaaagagaatgcgcggtgtaatccacggattttccgccatttcatccagcgcctcaatcagcctgtcaaaaaattcgcgtccccgcagatccatgacaagcgcgaccttgctcatttttgaacttgattctttcatcagctccaaaaatttcggcagcaaggaaggcggcagattgtcgacgcaaaaatagccgagatcctcaaagctttgaatggcgacggttttccccgctccagacattcccgtaatgatgacgagctgaatatcatggttttcattcatactcatctttctcccccctgcggtctttcttttatttgataagctgcggatctaaacgatagctgagcagctcgaagtccggcgtatacgtaaaggtgccgtgcaaaagcccttggcccttgatcataaaatcaaggatatgcccgtctccgggggccatcggaaggctgtggatatcttttacgtcatgccacttcagaacgccttcctctgattcagcgacattccgccccgtgtaggagtcggcgacgaaagtaaacatcatccactctgacacgatttgttcctgttccttaataataaaggtaaacacgccttttaactgcggatttagtatataaatgcccgtctcttctctgtactctctgatgacggaatctctgacggattcgccgctttccatcttcccgccgggcgcgacccaccagccccgtctcggcttttggagaaggagaacctgatcatctgtctgcagcacacaatttgtcactctttgcacaagtacgtcacctaaccttctcaacaaatcatcgtctcttcattataccgtttcggcatgtctctcacaatgcagagacaccgacatccttttcttttatttgacagaaaacagaaaatcgcaaaaaaagggcacggatactggaatccgtgccaaagtgtattcattaaaaagggggtcaattactacattcatcttaagacatcagtgtttcacccgtgttacagcgtaattaaaacacagtaacgattcaaaaactgaacattacagtgattatttaacggttttgagcgtttcctcaagctcttccacataatgctgaacgctttgagccgcaatacttccgtcgcctgtcgccgttacgatctggcggagcgttttttcacggatgtctcccgcggcgaaaatgcctggaacttttgtttccatttgagcgtttgtttcaatgtagccttcttcatttgtgatgcccaagttttcgaacggtttagaaagcggaagcataccgatataaataaagacgccgtcagctttgaattcttcctcttctcccgtcacggtatccacaagagtaagtctgccgacttttccgttttcctcatggatttcttttacggttttgttccatttgaagtcaattttctcattgtcaaaggcacgcgcctgaagaatgctttgcgcacgcaatttgtcacgtctgtgaacgatggtgacttttgaagcgaagcgtgtcagatagacgccttcttcaacggcggagtctccgccgccgacaacgacaagctctttatttttaaagaacgcgccgtcacaaaccgcgcagtacgatacgccgcggccgcccagttctttttcgccgggaacaccgatctttttgtattccgctccggcagaaatgacgatggcgcgcgctttatattcttttgaaccggctttgaccgttttatattctttgccgtcaacgatttctttaatatcgccgtacgcatattccgcaccgaattttttcgcatgttcaaacattttattagaaagttcagggccgagaatgctttcaaaacccggatagttttcaacatcctccgtgttggccatctggccgcccggaattcctctttcgatcattaatgtggataagttcgctcgtgatgtgtaaacagcagcggtcatccccgccggacccgcgccgataatgatcacatcataaattttttcttctgacaccatgattcactccttttcgaaatggggcgcaccctatatggataagaatccccatcaatcgtattccttacccatatcctattaaatctgagggcaattcgctatttttttgctcatttttctaagaaaccgtgattaggcagctcctgagcgggtatacaaataaagaaagagccttccgggatagaaggcccttgtcttattcattattgcacgacacgtcttacattgccgttgaatgctttcttccagtaagggttgctcatagaatcaatggatacaccgtgtgatgtattatcgttcaggaacgttccgttacctaagtagatgccgacgtggccgtttgttttatacgtattgaagaatactaagtctccgcgtttcatgtcagacgcgcttactgctttacctcttccgattaatgtatctgtgtttgtgccgcttgcaggtccgaggttaacgcctgcgttagcataagcccagcgtacgaatgaagagcagtcaaaaatacggttgttaatatcagattgagtgcgtccgccgccgaatttgtacggggattgacccacaaggcttgaacctacgctgatcgcgccttcaataccgcctgaatttgaaataacagatccgccgtcagaatcatctgaaccgccgctgttatgagatgatccgcctgaagtgctcttcggtttgcttgagctgtcagatgaatcagatgatgttgaaacagccgcttttttcacagttttaaccgccggtgccggctggctgtcatctttttggttttggtcttcagaagctttttgcgcttcttcctgttttttgatcagggcagccgctgcagcctgctcagctttaatgcgcttctgttctttttcagtgtcagctttttcgtttgcaagctttgatgcttcttttttcagatcagagatagcggaagccgcttttttctgaccgtttttcgcttcgtcgaaaagcttgtctttctgatcaagctgtttgttcaggtctttttgcatagactcgagtttcgcaagatcatcttgaacttttttcagcttcacgttaagttcagcttctgcgtcttcgagtttcgctttatcctgctcctgctgtttgatcagctctttatccgcatcaacgatagaagataccgcagtcgcacgggaaatgaagtctccgaagcttgtcgcccctaaaagaacatctatgtatccttgagaaccgccgttttcctgtaaagaacgaacgcgttttttcaggatttcattgcgtttttcaatacgcgcttctgtttctttaatttcttttttcaaatcagcgatctgctttttcgttttttcgttttcagcttttttatcttcgattttattgcttgtatccaacgctttagcgttaatgtctttcagttctttttcaatcttagcctgcttgtcctgaagcttagacaattctctttcttttgcttcaaggcttgaagccacctcagattgcttgctttcgatttttgcttttttgttgtctaatgtttccgccgatgcagtttttgtaaacgggatcaaaaaactgcttgtcccgatgacggaagccaaaccaagtgttaataaactctttttcactttttctttcctcccttttactttaaacctgttctcatttggaattctattatgaacatcaaagttacgctccctcacatacccgtgaggctgatgatttttatgtatgaatctttaaatcttttaaattggtatagattatacagcacatgtaaaataaactaatctcttatgtacgagactcattataccatcatgtttcgacaatttttattacagttatatttcaatgtgattgcaaatctcatattttgcaaaataaacggtgattacggcctgatttcgattcgaaaagcaaaaaaatacgtatgaatacctcttttttcggcggtaaagttctgttttgccctttctgataaaaaaagaaccgactctttattatagaaagaatcggttttattctaatatatcgtctatttgtctgatgtatttcgaaagtgttgccggcgttataccgtaaacggcggccgtttcttttttcgtcgttttttcgccgtttgcttctttccatacatatgcgatggctgctgcccacgcccgctcattctgtacggcagcggcggcgcggatgtgctgaatgacgtgaaaaacccagcagctcatgacgtcagtttttaaactgtcggcttccgctttctccagcagcttgaccgtccgatacgtgaacagcgcatcaccggagacgcctgaagcgcctttttcaccggaaagcagcagtttgacgaaatcttgttcaaacggtgaaacggcgcgttttgccgtcagaactttttcaagctggttccgctctccttcagcgctgctgatataataggcggcaagccgctgttcaagtgaagcaggcagcggttcctgccgctccgcccaaggcgcgggccgatctgattcgggaaattcggcttcggcctttttccaaatggtttccgcaaattctgtgcggcctgtcccgtaggctgaagcggcaagccagtaataaaacgtttcgtcgccttcaaacccgcttttgtaaagagaacggagccatttataaccgagatcatgtctgccgacaagtgcaagcgtcgcccccagcttatagcgctgttcgaataaaatcggatacacattggcgagttttccgctcaattctccgactttttcatcttccctctcgtaatagcagaatacaaggaggttgcacagggcatggagattgccttcatttttctcaagcacttcgaataccgtttgtttcgcttttgtgacattgcctgagtaaaagtaagcgagcgccaggttgttgtatgcggaccaaagctcggggtaatcggccgtaatctcttcaagcatgacaaccgcttcatgaagctggccgctctcaagaagcgtttttgcccgatcctgcctgatcagcagttcatcctggtcatagagcgattcgttttcacccgcttcgccgaaatccaaaagctccatcagactttcaatctcttcgctgaattccccgtccggatcggcatctgaataagccgccgcttctttgtatgcttcctgaaagagtcccaaatgcgcgaaattattcgctttaaagtaatgacactcgggcatttcttctttcaggttcaccaaaataaagtcgaacagctcatttgactgctggtagtggcccatttcagaataaatgacggccagccgggacagcatttcggaatcattcggctcaaggtggacggcccgctgaatcagtttgctggcccgttttaaattccgctctctatatgcttttaagcctttatgaaaaaaatattgtccatcctgaagcagctggacaatttgcgcgtgctttttctgttcagaagtgtgttttcccacaaatatcctccgttttatacgtattaccgtcagtagtataccataaaacggtttcgcctcaatagttcaaaagacaggatcggcttcgttttttactggctggttcgaccagattttagctgtttttttcacgaggctcggctggaagaatgacgcggaaaagggttccttcgccgcgcttgctctcaacctctatcgaaccgccgtgcagctctgcgattttttgggcgatggacaggccgagcccgcttcctcctgcatttctcgccttatccgctttataaaaccgttcaaatacacgctccgcctgttcaggctccattccgattccgtcgtcggcgatttcgacagccgccgctcccggcagatctgcaattttaacggaaatgcggccgccttcaccggtaaattttacggcattgtgaatcagattcatccatacttggctgagcagcgcttcatctccgtacacatacgactcctgtaaatcaatgagaaactcaatctgtttggcggaccactcaggctcacaggtcaatatggtgcgccgcagctgtttgtcaatgcggaacggttttttttgtatcggttcggtttggcgttcgagcgcagtgagcttcagcagattttcactgatttttgataatcgttctgtttctgtttcgatgatgtgtaagtagcgcccacgctcctcatatgataaatccggttttttcaggagatgcgcgtagccctttaatgaagtaagcggggtttggatttcatgggaaacgttcgaaataaattcttgtttcagtttttccatttcactcagttccgcggcgagtgtcgacagttcatcagccaatttcgtcacggggtggttccgctcaatcttctccattttccgggaagcggccgctgtgaagttgccgctcgacatttgcttgatcgtggcggtcagcgaatcccagatcgcatgatgcctttcgcgtgctgactttgaaaagataaacatcgttataaacagcaggccgaaaacaagccaaagcgtcagaatctgctcggcgtagggcacaagcaaaatcggccatatgagaccgaatccctgaacgatcaggtgagccgccagccataagaatgcggtgacggtgagaaggatgatgatttttccagccgttctgaagatccgtttcattccgtcaccacaaaccgatagccgagcccccgcaccgtatggatggcaaacggatagtctttttccggaaaccgttctctcagccttttaatatgcacatcaaccgtccgctcgtcaccttcataatcaaagccccaaatatcttctattaattgttctcttgaaaacgtcttattcggataaccggcgagcttaaataaaagctcaaattcacgccggggcagtgtcaatcccgctccgccgcgcgttacggtgcgggattgcttatctaatgtgaccgttccgatggtcagcagtttttcagcggtgatccggtaccgtttcagcaatgctttgacccttgcttccagctcaagcggctcaaacggtttgacgagataatcatccgctccggaagtaaaaccttgcactttgtccagcgtttcgccttttgccgtcagcatcaaaatcggaatgtccgtaaagctgcggacggcttcactgacttcaaacccgtccattttcggcatcatcacatccagtatgatgagatctataggtgctgattcgatcagccgcaccgccgcttccccgtcttccgcttctgcgacgtcaaaaccgctctgctccatcataaggcggacaagctcacggatatggcggtcatcatccgcaaccaatatgacagccatgaaaatccctccttctgcttttttgcctgtcttcttttaatgaatcgacatgatgtctattaaccgtcttattttttcattgtctcctgtatcgacagacactttttttgtatggcggatcatttcctccgtcacttctttcattacgccttgatcagtatcttcacgagactcccagcgcaaaggaacattgtatacctgaatggtgccgtcaccattgctgctgtaagtgactgacccatcgattaaccgggagcctgctaactgcgtaacatcttccggatagcgggcgctcgtatgatcgtcaggattgacgagtgctccggccggaatgcggcgaacgttcaattcatctatctgctgattttccccaagctgcagccagatgcgggcatattcaatttgcagaggagaatcgtctgccgacatgttgtccggttcgcttttgtccgcagagatgtgatgtgaatctttgtttacgggttcttttttttctgccgctgatgctgtttcagccttgttgatgccactgctttctccggccggacttgaagaatggctcggctcttcatcgttaccgcccatacacccggcagtcatgaatacgagcagtaaggccgcgtgacaataaaaaatctttgtgcgttttttcatcatttaaccctcgcttccaatgaacaggactccggctgcaaaataaaaagcagctttttcagctgctttttattcataaagtcttgctttacacagctttgttttctaagtcggcattcagcttcagctgctgctccgcaaaatcgcggtacagcgaatgggatgccattaattcatggtgtgtgccccgtccggtgatttcaccctgttcgacaaagagaagctgatctgcatccacaaccgtggataaacggtgggcaatcacgatggtggtgcggccttccattagaacttccagcgcctgctgcacccatttttcagattggctgtccagacttgatgtcgcttcatcaagcatcagaatgctcgggttgcgaaggagcgctctggcaatggcgatgcgctggcgctgtccgcctgacagcataatcccccgctcaccgacctcggtttcaaatttcttcggtaagtcttcaataaattgcagggcgtaggccatgtcagctgcttgcctcagttcctcatcggtcacctcgcgttttaatccgtagcagatattgtcgcggatggtgcctgacattaacgggctttcttgcgacacgtagccgatatgctcccgccatgactcaagggaatacgcatcaatcggttcatttccgagcaggatgctgcccgcagtcggattgtagaatcgttcaagcagcttaaataacgttgttttcccgccgccgctcggtccgacgatcgcggtgactttgccggcctcgattgtagccgtaatgtcttttaagatggtttgatctgttttgtagccgaatgagacttgttcgagcttaatcggctgatccgcgttttcaatggcttttccggtttggatatcttcttctttttctgcaagaatatgaatcatccgttccgttgcgccgacggatttttgaagctgtgtgaaaaatgaagtgatctggcccatcggcataatgatctgaaacaaatacaggataaaggcaacgagtgcgccggctgtcaattcaccggatgacacctgcatcccgccgtacccgatgacagcgaccagcgccgccattaatacaagtgtaataagcggacctacgagcgactgcaccttcgcttcacgcagcccgagtttaaagagtgccatgatgcctgcttttccgcgtccgtattccgcttcttcagcgtttgacgcttttacaagcctgatttccgggaggatgtggtttaataatccggtgaatctcgccgtttcatcctgtgtttcccgagaaattttaaacattttccggccgatcggcactaaaatcaccgcagccagcggcacgacgatcagcacgagcaatgtgagcttccagttcatgaaaaataagatcgtcagtgacccgataacggaaatgattccggtaataaatccgctgatattgtttgtgatcagctcttttaccaccattgtgtcattggtgacacggctgatcgtttctcctgtggcgtttttgtcaaaataagagacgggcagtttaattaatttctgccacaacaaatcacgcagtcccgagatgattttctggccgctgtagttcagggcgtaggtggcgtaggcgcttaatgcggcctgtacgataaacacggctgcgatgattccgatttgcacgcctgacagcgacgacatggaaaagccgtcaacgagctgctttgtcaacagcggaatcagcaggctgacgagcgttgtcacaatactgagagacagcgcgaaggccagcataccgtatgatggttttgtttttttgactaatgaaaagaatgagctgaatttccctttaggttttggttgtttattcggcatatgttttcctcctatatcactgtttatactataacggatgtgcatgaacggaatatgaacaaaacgtatatttttaataaaaaccaaaataaactctattagtcaatattatcaaattcatctgcctccggttgcggaaataaggaatatttaattgaatgtttaagttagacagattaaaaacctcacggatctctccgtgaggtttgttttactcagatgctgaatggcgtttcgcaaggacgtcaagcacgtcgtccaaaggaagcgactgctcacgcagaagaacgagcaaatgatacagcaaatccgctgcttcccattttaattcttcatggtcgcggtttttcgcggcgataataacctctgcggcttcctcgccgacttttttgaggattttatcgacgccttcccgaaacagatacgttgtgtaggctccgtcaggcatctccgcctgccgtttggcgattacgctttccagttcatttaagatgccgaaacgatcctgcgcgtccgctttttccggagaaaagcagctgtaacttcccttatggcatgcgggtcctgaaggctccgcaagcacgatgagggcatcttgatcgcaatcatagcggatggctttcaccatttgggtattccccgacgtcgctcctttatgccacagctccccgcgtgaacggctgtaaaaccaggtttctttcgtttctatcgttttttcgtaggattcacgattcatataagccagtgtcagtacttctttgcttgccgcatcctgcacgatggcgggaatcagtccggcctcgtcaaaccgcagttcatctgcccgtttcatctcacattcaccccgtgtttcttcatataatctttcacttcttttatagatgtctctttgtaatggaaaatggaagctgcaagcgcggcgtccgcttcaccgatcgtgaaggcttcaagcatatggcgcgcgctgccggctccccctgacgcaatgacgggcaccgggacggcacgtgtgacaagctgtgtgagcgtatgattaaagcctgttttctcaccatctgcgtccatgcttgtcagcaggatttcacccgctccccggctgacggcttcttttgcccaggccgtgacttcccactcggttttctttctgccgccgtgtgtgtacactttatagcaatccgaattttcatcatactttgcgtcaatcgccgcgacgatgcattgcgagccgaaaaaatctgctccttccgtaatcagctcggggcggaggacggccgctgtattaacggatactttatcagcgccggcgcgaagcattcgtttcatatcgcttaattgattgattccgccgccgaccgtaaacggaatcgccagttttgccgcaacctgttctacgacgtctgtcatcgtcttgcggccttcgtgagaggcggaaatgtcgagaaaaacaagttcgtcagcaccctccctgtcgtaggcttcggccagctcgacaggatcgcccgcatctttcagcccgagaaattgtatgcccttgacgacgcggccttctttcacatcgagacacggaatgattcgtttcgtgatcatgcgtccttcaccccgctgagcgcttcagccaatgtaaattgttttgtataaagcgcttttccgataatcgctcccgatacgccggcgtctttgaagcgggccagtgctttgaggtcggcgactgagctgactccgcctgaagcgatgacggtttttcccgttgcttttgcgagctgaacggtgctttcgatgttcggtcctgacagcatgccgtcagttgcaatatccgtgaaaatgaaggtttccgctccttcggccgccaattcacggcccagatcggccgcccttaccgaggatgtttccagccagccttccgtcgagacatatccgtttcttgcatcaagaccgatcgcgattttgccgccgtattgtttcagcatgctcttcacaaatgccggatcggaaacggccgagctgccgagaatgacgcgatcaacaccttgtgataaataaccgtacacatccgcttcagaacggatcccgccgccgatctcgactttggcatcaagctgccgcgcaatgtcaagaacatgcctgtcgtttactttcctgcctgctttcgcgccgtcaaggtccacgagatgaatccattcggcaccttcttgtgcaaattgcgccgccatgtctaaaggagagtcaccgtatatcgtttccttgccgtaatcgccttggatgaggcggacgcatttgccgtttctcatatcgattgccggatataatgtaaaagcgttcatttcttcaccttctgttccgctgccatttttgtaaattgcgttaagatcgccattccggccgtaccgcttttttccgggtgaaactgtgcaccgaagacattgcgtttcccgacgaccgccggaacacgaacgccgtactcagcgcttgccagaagatcgccgtcttccatcccgtctatataataggaatggacaaagtaaacgaagccttcttccgcttccgaaagcaaaggagacgtttggtgaaacgtcagccggttccagcccatatgcggcaccttcagcttgtttccttcgacatctctgtctttgagtctcacagcttttccggctaataaaccaagtccttttgcagagccgttttcggtgctttcttcgaaaatgagctgcatgccgaggcagatgccgaggagcagcttccccttgtcaaccatacggtgtatgaattgatcaagcttcgcgctgcgtaaattgtccatggcgtcactgaatgatccgacaccggggagaataaaagcatccgctttttcaagctcttccggccggtctgatacgacatacgggacgccgacgcgttccagcgccttcgacacgctgaataaattgcccataccgtaatcaattacaccgatcatttacagcattcctttcgtagatggcacgcccttgacgcgcggatcaatggatgacgcttcgtccagcgctctgccaagcgccttaaacacggcttctatcatatgatgcgtattcgtgccgtaatgaacgatgacgtgcagattcattctcgcttccagcgccagtttccataagaattcatgtaccagctcggtatcaaacgttccgactttcgcttgcggaaatgcgccgcgcatctcaaggtgcggccggttgctcaggtctacggcgacttgggcgagcgcttcgtccatcggtactagcgctgatccgtaccgtttgatcccttttttatcaccgagcgcctccaaaaaagcctgccctaagcagatgccgatatcttcagtcgtgtggtgatcatctatctccgtatcgccttttgcgtcaacagttaaattgaattgcccgtgctttgtgaacaaatcaagcatatgagtcataaacggcacatccgtgctgatgtcggcttttccttctccgtctatttcgaaagccagcttaatatccgtctcatttgttgttctggcgcgttccgcttttctcatcggtcattcctccgtttctcgcttcaatcgatcttgcgtgcgcttcaagcccttccagtctcgcgaaggcggaaatgctgtccgcgtgtgtttcaaatgccttccggctgtatgagatgatgctcgatttcttttgaaaatctgttacattcaacgggcttgaaaaccgcgccgttccgtttgtcggcaaaacgtgattcggtccggcaaaataatcgccgaccggttcagcgctgtatcgtcctaagaaaatcgcccccgcgtgtctgatgcttccaagcaaagcctccggcgaatgcgtcatgatttctaaatgctcgggcgccagcgcattcaccgtgtccactgcatcttccatcgattccgtaatataaatgcggccgtgatccctgatcgacgcttcggcgatttctttgcgcggcagcgtctgaagctgtttattcacctcatctgatacggcttcggcaagcttccgtgagtcggtgacaagcacgcttgagctgagcgtatcgtgttcggcctgtgaaagcaggtcagcggcgacttctttgggcaccgccgtatcgtctgccaggaccacgatttcactgggcccggcaatcatgtcaatatccacaacgccgaagacttcgcgcttcgcgagtgctacaaatatattgccggggcccgtgatcttatcaacaggctgtatcgtttcggttccgtaagcgagcgcggcaatcgcctgcgcgcctcccgctttgtaaatttcctttatgccgagctcagacgccgccgccagaacgcccggcgaaaggcggccgtcttttcccggaggactgacgagaacgatccgttccactcccgcagcgagagcggggatgacattcattaaaacggaagacggataagcggccgtcccgcccggcacgtatacgcccgcggaatcgagcgccgttattttctgcccgagcatcgagccgtctttgcgatggtaaaaccacgaggattgcagctggcgttcgtgatattctttaatattggcaatcgcctgtctgatcacttccagcagctgatcatcaagcagacggtacgcctcggtgacttcctctgcactcacggccatttggttcaggctgatgccgtcaaatgtttttgtataggctaaaacggctttgtcaccgttttgtctgacgtcttcaataatctccctgacggttttccgctgctcttcggttccgctgtcgatggaacgcttcagtgaaaaccgctcgcttctttttactgcggttattttcattgtgccgtttctccttccacaaccctggccagcctggccgccatttcgtcgattacatcatccttcatgcggtagctgaccggattgacgataaaacgcgatgtgatgtcacaaatatgttctgattcaacgagaccgttttcctttaatgtccgcccggttgatacgatatctacgattctgtcagcaagcccgattaaaggcgccaattcaatcgaaccgttcagcttaatgatttccacctgctcgccctgctctctgaaataacttgacgcaacattcggatatttcgtcgcaatcctcggggcgactccgttccaatccgctccgggaagccccgcaacggcgagatggcatttgctgattttcagatcgagcacctcatacacgtcacgctcttcctcaagcatgacatcctttccggcaataccggcatcagcgacgccatgctcgacataagtcgtcacatccatcggctttgccagaataaagcggagattttcttcaggaacgtcaatgatcagctttctcgattcttcaaactcctcgggcagcctgtacccggcctgccgcagcaacccggccgcttcttcgaatatccgtccttttggcattgccattgtgagtaccttacccattctgctcttcctttctggcaccgataaagtatgtgacgtttgcaaatgattttgtcatatgatcgatattttcaatgcccgccagatcctgcaggacgacttttctgcctctcgccctttcttcctccgcgaataaaatggcctgcgcccgctgctccttgctgaaaatcacggcgtccgcttcactagtttcttcctggatgccgagcgcttcaatcagcctgtcgatacggagcccgaaacccgtggcgggagcgggactgccgaaatggccgagaagattgttatagcgtccgccgcttccgatgacaaaaccgacatttgccgcatacacttcgaataaaattcccgtgtaataactcatatggcttaccatattcagatcaaggcgaatatgctcggcacttccgtaatcctcaagaatgtcccacaggtcttccagctcctgaatcaagctttgtccggagatgccgatgatctcctccgccttggcgcagatctctttcccgcctcgcaattccagaagtgcgagcagccggcttttgtctattgaagaaagcggaagcgatttgacatgttccctgtatcccacgtaattcttctcaaagagaaagcgccgcagaacatccgcccgctcagcattgcccagaacctcgacaaacagctcatcagcgagtccggcatggccgatcgcgattttaaaccggtgcaatcccgcgtttttcaaagcgccggccgccagcgcaatcacctcagcgtccgcgcttgttgatccgtcgccgatcagctccgcgccgacctgttcgaattcggccggacgtccgccttcccgctcctgagcgcgatagacgcttgccgcgtaccccgctctgagcggatgattgtgtttgtgcagcttagacgccgccaccctggcaatcggtccggtcatgtcaggccgaagcacaagcgtttttccgtcctgatcgagaagcttaaacagctgctgttcttcaatggctgactggacgcctactgtttcataaaattcaagggtcggcgtctccataaactgataaccccatttatcaattaaatccgtcagtgtggaacggacttttttctttgcttcgtataaaccgggcagcgtatctctcatgccatgcggtttctcaaacataaacatttgccttttacacctccgctttgtctgaaggaaaattccgaatcctttagttcgctaatatgataatatgttagcagataaaagaatgaattgcaacgcccaatgtccgcctactcttttccataaacatggctaaagaatgaacaaacctgtaaacatatcggaacgatcgaatcatattgagcagaagtgctataatacatagaatagcttcaacagaaacaagggagaagaattgataatgaagacgcttggaacattatgtgtgctgattctgacagccgtccttgtctatctgggatataacatctatacaaacgatattcatttgaattttttcaatcagcagtccgacgagcctgatgagaaaacaccgttaaaagggagtgcgtcaccgctgaatgtcgttctgtacagacagatggattctcccagactgtacaatggctgtgaggtgacaagccttgccatgattttgaacaatgccggatatcatgtgtcaaaaaatacattggcggataaaatcaataaagttccgctcacatacagcagcgggctgaagggagatccgaatgaaggatttgccggagatatggaaaacggcccgggtttaggcgtttatcatgagccgattgataaacttgccaaagaatatgcgggaaacaaagtatacgacctgacgggaaaagacatttcttcagtgtaccgccagcttgaaaaagggcggccggtctgggtgattaccaccacatcctttaagccggttgataatatgcagacttggaatacgccgaacggaaaaatcgacattacgttcagcatgcatagcgtagccgttaccggttatgatcacgattatgtatacgttaatgatccttacggctataaaaacagaaaaacaaaccgatctgactttgaaaaagcctggaagcagatgggcagccaggccattgtgatcaagtcataaaaaaaccccgctgacgttaatcagcggggttttccattcgttttttcatttcttcgtccgtatagatcacctgcatcggatttcctccgacaaacgccccggccgggacatctttatgcaccagcgtgccggctgatacaacggctccgctcccgatggtgacgccgggcagaatggttgtgtttgccccgatcatcacctcgtcaccgattgtgacaaaaccggtccggtactcatgtattaaatattcatgagccaaaatcgtcgtattgtagccgatgatactgttttttccgacagtgattttttcgggaaacatgatatccggcatcaccatcagcgcgaatgacgtctgttttccgacattcattttcaaaaaggttcggtacagccagtttttcacgcttaaaaacggcgtataccttgcgatctgaatgatgatgaaatttttcatcaccttcagaaaggggaccgtctgataaacatgccacaatgaatttgcacctgaaaccggatggcggtctgtttttctcacggattacttcactccggtgatgtgcaataaatcactcattttttcgagcatataatcgggttcataggcggaaagcgtctgtgcgcctttaatcgtccacgcgacgccggctgttttcgtgccggcgttttttcccgccatgacatcgtgataattgtcaccgaccattatggcttccgacgaaccgcacccaagccggctgagagcaagccgcacaggctcggggtcaggcttcggatgctttacatcatcaagcgtgacgacagtatcgaaaaacgccccgatgcctgtcagcttcaatcccatattgactgtatccctcagcttcgtggtgacaatcccgagctgatagcccgcttttttcaattcatccagcgtttcataaaccgtttcgtactccgtgacgagctcatcgtgcttttcatggttgaatgctctgtacatgctgatcatctcatcgcacttttcagcattaatgcctgaaaacgtttcatacagaggcgggccgataaacggaagcacatcttcccttttgaactgccccgggcaataatgatcaagcgtatgaaggtaagaagcgataatcagttcattcgtgtcaatcagcgtgccgtcgagatcgaataaaatggcggttacacgtttatcagtcatcttatgtcctttccgatttcaggcgtcagtccgtgtcggcataccgcttatcggcataccccttcatgcgtctgaaaatcattaaaataatcgcaagtacaatcagcacaatggaaatgacctgcgcgatccgaagctggctcgtaagcatcaggctgtccgtccgcattccctcaataaagtatctgccgatcgaataccagatcacatacgtcaaaaacaaattgcccctgcgcaggttcacgcggcggagcagaagcagaatcaagacgcccgcaaaactccacagcgattcatacaaaaacgtcgggttataatattgtccgtctatgtacatctgattaatgatgaaatccggaagatgcagactttccaaaaatgaccggctgaccgcttcaccgtgagcctcctggttgataaagttcccccagcgcccgatggcctggccgagcagaatactcggcgcggcaatatccgccagcttccagaatgagatccctcttacttttgaaaagacgattcccgttgcgatcgcgccgatcaatccgccgtgaatcgcgatgccgcctttccaggttttaatgattaccccggggtgttccgagtaatagctccactcgaaaagcacatagtatgcccgtgcgcaaatgattgcgatcgggatggcgaaaagaacaagatcaataaaaatgtcctttttcagcccccgcttttcactctccctcatggccatccaaagccctaataacgcacccgcgccgataatgatcccgtaccagtgcacggataaaggcccgagctgcaaggcaatcggattgattggtgttcctgcttcgttcatattattgccaactcctattcgtcttgttcgccgtcttcaatgacatccgccagcttattcgtaaattgctcggcagcatttaagcccatccgcttcaatctgaagttcatcgccgcaacttcgataataacggcgagatttcgcccagggcggactggaatggtcagttttgtaatttccgtatcaatgattttcattttttcttcttcaagtccgagacggtcgtattgcttcccttgctcccaaagctcaaggtccatgacgattgtaattcttttattgcttctgacggcgcccgctccgaacagcgtcatgacatttataatgccgagacccctgatttcaagcagatgctcaatcagatcaggcgcattcccgacgagcgtatcctgatcctcctgccggatttcgacgcagtcatccgcgacaagacgatggccgcgtttgacgagctccagggccgtttcacttttaccgacgccgctttttcccgttatgagcacaccgacgccgtatatatccacaagcacgccgtgaatggcggttgtcggcgcgagacggctctcaagaaaattcgtcagccggcttgacagtctggttgttttcagaggggatctgagcacaggcacgccgtttttctcggatgcttctacaagctccggcgggatcggcatatctctggaaagtatgatagccggcgtcacatcggtgcacagcgattccatccgctgttttttatcctcctcaggaagctgatcgaaaaatgacagctccgtttttcctaaaagctgcacccgttctctcgggtaatatgtaaaatagccggcgatttcaataccgggccgtgataaatcactcatcgtaatcgggcggttaatcccttcttctccgctgatcaattctaaatggaactgctccattacgtctttggtccgaacctttgccaagatatgttcctcctgttctgggatgttccgagctttgaacagttatattttatcactttactgtctgaaccaaaacagatttatacaattccggcataactggtctagataactagtctgaaaaggagtaaaataaaactaacaactaaccagaaaggcgtgttttaaagtggctgaaagcttgttaatcagcggtgcggacatcgtaacagaagaagaaatcatccgaaacggttttctcggtataaaggacggcatcatttcttacgcggggaaaacaagaccgcaagaaacgtatgagaaggaatggaaggcgcccgcgggttcgtatgcgcttcccggaatgattgatattcatattcacggcggatacggcgcggatacgatggatgctgatgttgcagctcttgatacaatgtccgcccggctgcccgaagaaggaacaacctcttttttagcgaccacgatcacacaacagcacgaaaacattgaaaaagcgctcgtcaacgccaaaaaatgggcgtcttcctcaccgcaggcccaaaaaggcgctgagttgatcggcattcatttagaaggaccgtttgtctctccgagaaaggcgggagcacagccgaaacaatggattactcctgctgatgccgggctctttcagaaatgggagcggctctcgggagggctgatcaaaatcgtgacgcttgcaccggaagaagatcctgatttcagcctgatccgttatttaaaagaccaaaacatcatcccgtcaatgggacacacagacgcgggagccgagcttttacaaaaagcggcggatgccggggcggtgcatatgacgcacctcttcaacgccatgagctcctttcatcatcgtgagccggggggcatcggtacggctctcgcctgcggccgcatcacggcggagctgatcactgacggcattcattcccatcctttggccgttaagcttgcctatttggcgaaaggaagcaaaaacctgatcatgataacagactccatgcgggcaaaagggcttaaggacggagaatacgaattcggcggacaaaaagtcaccgttcgcggggacacggcgcttctctctgacgggacgctggccggttccattttaaaaatgaatgaaggcgcggcgctcatgcgcaggtttacaaactgctcatggctggatatagcaaatatgacatcggcaaatgcggcccgccgcctcggcatattcgaccgtaaaggaagcatcgccgaaggaaaagacgccgacgttgttctgacggacggacagtgcggcgtgctggcaacgatttgccgcggaaacaccgcatatatctcaagggaggctgattggacatgaacgttatcacatgcagacattatgaagaattaagtgaaaaagccgcagcgattatcgctgaaacagtgaaacaaaagccggatgccgttctcggccttgcgacgggaggcacccctgaaggcgtatacaaagaacttgtgcggatgcaccgctcagaagacttgtcattccgaaatgtcacgacgatcaaccttgatgaatacgccgggctttctcccgaggacaaaaacagctatcattattatatgaatacacatttttttgcacatatcgacagccgaaaggaccgccactttctccctgacggacgggcagacgatcttgatgccgaatgcggacgctatgaccgattgattcaaacactcggcggagcggatatacagcttttaggcatcggacacaacggccatatcggctttaatgaacccgggacgccatttgaatcccgaacccatgtcgttgagcttaatgaagagacaagacaggcgaatgcgcggtactttccgtcaattgatcaagtccctgtaaaagccctgacaatggggatcgggacgattttgtccggcaaacggattttgatcatggcatccggaaaaagcaaggcccaagcggtgaagcagcttctggacgggcgcatcagcgaagcattccccgcctccgccctgcacgcgcatccggatgtgacggtcttgattgatgaaaaggctgcgggcggcgattgaaaggatttgacctatgcagattgataaacaatctccgattccgatttactttcagattatggaacaattaaaaacacaaatcaaaaacggcgagctgaaagcggatgcgctgcttccgtcggagcgggaatacgccgaacaattcggcatcagccgaatgacggtgcgccaggcgctttccaatctggtgaatgaaggatttttatacaggcagaaaggccggggaacgttcgtcagcaaactgaagatggaacagccgcttcaagggctgacaagttttacggaagatatgagaagccggggcatgaagccggggagcagacttgccgaataccagctgattcaggcgacggaagaattatcttctatcctgggatgcggctatcaggcaacgcttcataaaatcatccgcgtccggctggcgaatgatatcccgatggcgattgaagcctcgtacattccgtttgacaaagcgggaaaactggacgcctctcattttcaatcatccatgtatgagcatattgaagcgtacaatcagatgccgatctcacgggcaaaacaagagcttgaaccgggagccgcttccgaggaagaagctgagctgctcggtatccagcccggcgcccccgtcctctatatcaagcggaccacttatctgcaggacggcactgcctttgagcacgtcaaatccgcctacagaggcgaccgctacacattcgtgcattatatggacagggtgaaatgaaacatctccaaccgttacgggttggagatgttttttgatctgccattttcaaatcaagccggtgaatgttctctatgactctgtcaaaatggtgaggctgtggttctggtatctatttttataaagaaaaaagtaataaaatgctaccctctgttttggacaatatacggaacctgctttgaaaccagcagcagcggttctttgtttttatgagccagtgaaaacatgattgcgccttcaatcatcgagttgattgtcaccccgagcttctccgcttcctcttgttcaaacccatgctcaagaaattttgccgcaaacacatccgtccacttcttgaacacctcaacacatgtgcatcttaacgtttcattgatcagagcggtctcacccgccagcaatccaaccggcacgccctcaatattctgcggatcattaaactgttcagccgttacatgaataaagtgctgaatcgcttctatagggtccgcgaattgagacatactattctgtatttgcttttcaacgcatcttcccgtatatttgatcgccgcaatggcgagttctgcttttccgtttggaaagtgatgatacacagaccctctgggtgctccgctctcttttataatttgattcaaaccagtcgcatgatatccctgaatctgaaaaagatatgcagaggtttgaataattctttcttttgtcccggttttactgttcattatgtttcctcctgcatattacgaaaaccaatcgattttagtatagaaaagggacctaaaaaagtcaaaagcacttatcacagcaggacgccgccatttacgtacagaaaaaatcctgctgaccgtcagattttcttctgagcgatcagcaggctgtatttttttcgttatgggtttgaggcatgcctgaaatcaaactgatccggagccgggcgatacggcgtatttcccgttttgaacatccacaacggtgatattgttttgccgttgtacgggtccttaacaacggtgtaccagtaataaacggaatcaggctgcaggccgtcccagacccaatttgcggtttttccgctttttacgtgttttttatgaccgagcagttcgttcgtatagacgttgcattcaaaataatcggtcgctacccttttcctcttcggctgtaaatccatttctgctgagaattcgtctttatcagcgaacagatcggtgtcatagtaattgatgtcatccgtgtacggcgagtaggagaacatgtgaacctgattggcggcctgatcgaattgcatcatgcgcataaagccctgccccccttccggaccgtcctggtagtcggtcagaatttggtggacgaggcggtccggttttccgtccccgtcatcgtcaagcgcatcggtttttttcatggcgttatggtaatggccgcttaataccatcgccacattgcgattcggcttgacgacttttcgatagatcgtctccccgatcgggcttcgatttccgctcacaagcaagtactcatgaaagcataagatagcggttcggtccggatacctcttcagcacttgattgatccagtctatctcttgttccgcaatgccccagcccatataaatcataataaaatcgttcccgcttgccgacagcagatcataatgcccgcggttatttttgtatgatccgccgtaatgcatgttctgttcaaaccggcggctcccgaagaaatccccgaatgttcggtatgtgccgtctttatggccgacgtcgtgattgcctccaagcactccgtacggaatccccgccttgtcaagcgtccgcatggagtgatcggcgtttttccactgtttcatcaccattgaatcatcgacgatatcaccggtatgaaagacatatttaatattgtgcttttccttattttctttgatccactccgtcattttgtcaaaaatgtgcgggtgcccttgtgcgtaatactgtgtatccgacatccagacaaacgtgtaattgcctttcgccggtatttgatcctgcacgatgacattcatttttgagttcttcaccacatccgctgcggaaacggcggcttttaatgtaaacggctttttatctttggcaagaacgctgtccgcctcctgccagcggcttgtccggtaattccaaatatacatggttacctttcggccgggcagagagcttcctttccagaccgcctcggccagatccgtttcgtcgatagacgggtcaacggagacttcgaaccggtgataaggaaaacgctccatactttccgccgaaacggtttttccgtcatttgccgagatgcggttcatttccggcagggtaaacggcatttcattttcttttatgcccctcggcggttccgttaatgaggcgtgtttatacactttcacgctgcccggattccgcgcggtataacggaagccgcgataaaatgatacattcatgtcatccttcgtcgggtcttttacccggacggacagctttgctttgtgggcgccgattttttgatcggcaagctccggctggttcggctcctcccgtttgatatggaaggtgcggacggacgttgtttcatttccggcaaggtctgccgcaatgatggtaagggtatgttttccgggcttgagatcggctgatgacgtgtgatgggggagcgtaatgctttctccgtccaaaaacgctttgacctcttccactttgctccatttgtcacggatgtccgcatttagctcaacattacctttcagcgccgcgccttctttgatacccgggacaatcttcggccccgtattgtccacccgcacagattggctcagctgttcctcaccgtcgctaacaaaaatatggtgatagccttcagaaagcttcgccgtgttccacggcagcagccgtgacgtaaacaaatgatccggcaggctgaatgagaaggtcttctgctgattcgcccgcctgccgtcaccgataaacagctgctcagccggatccgtcttcccgtctttgatcaccgttccgtccgaaagcaccagacgggcatgtttcacgacaaaatcatcccgattctctcccgtgtcatacggagaaacctttgagcccgaacggatggatactttctgtgttttgccccctttttgcagcagacgttccggaaggagaaccgagtgcgttctgtaacggtgagacggatcgtcaaaaatgtgcagcacctcattttccattatgacggtgttttgaaaataaagattcgttttccgggcatcgaaggcgaaatagacctctttttccagcgccggccgggtctcctgccgcttgccgtcaatccacagcttgatcttatcggcgctgacgtcggaagtcgctttgagcagataggtgccggatatcgtatcttcgggttcaacattcattctgagtccgtgtgatttgctcgtctgttcaatgtcaatcatcttgacgggcgtttttgcttcattttctccatcactggctgcgatataatactcaagctgatcctggccgagcagttccggggaataaagaatgtgatggtataagctgtcgttgcggtctttttcggccagaattcgtttgaatggttttttctcattggtccggtaataaaacgcggctgttttgacaaggtttttgtcttttatgtcagcctttaattcaatgctttcagcgggccggacgggctttctgtctgtaaggtcttcgatgaccggtttttccttgtcgggttttatcacccttttctgctgcgggatctgcgcctgaaaaacggagcccggtgacggcttatgctcgctcgtggagatcttcagcaattctcccgttccgttcagcggatatttgtacagcaaagaagtcagccggcggaaagcgtgtttccggtattgcgccgaggcgatatccttgccggtatttgccgacagcaccaccgtacgcgggcggccgttggacattccgtccgtcccttcgatgacggcgagatgttttccctccttcaggcgtgtcccgtaatagcggttgaaatcatctatcgtcagttctgatgcggcgcgtctcagccaaaacacgtaagtcccgcctgacggaatgacggtatcttctttcggcctccatatcatgtctgattccggcccttccttcggatagcggtagcggatgtgatagtctttaaaatgaatgggcctgtccgtcgtgttatacacctcgataaattcataggcatcagcgccgtcttcatttttcgtatcaaccgcaagctccgtaatcatcagctcgggaatatgattcaaatcggcttgatagccgtccagcttcagccgctttttctccgattccgcccgctgtctgccgttggtgaaaacgaggtaatattccaattctccattccagatatcccgttttgaaacctgggccgtaaacagccggattgcgcctggcgcgggctccatcggcaccattttaaaccccagctcattgctttgtttataaaaaagaaacgccgaaaacgcttgatagtcagcattccgtacatgagcctgtatgaacaggtttcttttcatttccgcctttacttcgatttggggaggattctccagaagcggtatgtaatgaggcggctgtccgaattcctgctgattcacggggattgccgattctttgcgcgccgcatccgcagaaggactcacacaaagcaaaccaatcagaaaaaagagcgtcatcacaagtttcatctcattacctccctatgcattatgttgcgtcaggaggctgccgcttatgtaaatcacacataaaaaagctgccctctcgggacagctcgttttttacctttttctaagcggctccaatatgcctttttggatcagcaagtggaaaacggacagcacgacagacgcccaaatggcggtgccgaacccatcaatctgaaagctgtctcccatcaaggctgcggtcatcattaacgtaatggcgttgatgacaaacagaaagaggccgagggtcacaaccgtgacgggcaatgtcaatatgacgatgatcggtttgatcagcacatttaacacagaaagaatcacactggcgatgacagccgctccgatactgctgatatggacggaatcaaaatatcccgcgataacgattaataataaagcatttactaaaatgctgactgcccatttgatcatttatttcaaatctccttctaaaggtacaacaaaacaccagataatatatacaatcggcacgattccgctcgtgacaagcgctaatacaacggtgataatgcgcaaaagcgacgcatccatattgacgtactccgccaaaccgccgacaacgccggcgattttacggtttttttctgaacggtaaagtcttttcatccaatcacctctgagtatgcttgagcttaatggctcctgttaacgattctgagaaaatcgagagatgctgatcatggccttgatttgatgccagcatcagttctttttgaatggtatcattcttttcctttaaaatttccgcatcaatcagctcatggctgagagagccgagattgcttttgagctccgctttcaccgccgaatcatcaggcagggcgatctccacgtttccggtcgtcgttttcgtgtagatggagcggcagtgcggcgctgtcacggtaagcatgatattgccgttaaagctttgaacgtcaatggattcactcgatccgcgcaaatcaatcaagccgttgatcgtttccgcttcaatcgcgccgcattgatgtccggccagcttgatttgtccgttagccgtttccgccgacgctttatcagccgtcaaatgagagaatgacagaacgccgtttgtcgttttcgccgagaattcttttacatgtaaatgttcccctctgatcggtccgttaaacagcttcactcttatcttatcgtactctttctggggaacataaagcgtaacattggttttcatcgttttcttttccgtgcggacaaaaaacttattgcccttcacttcacactcaatgtgctgaagaaatgcggtgcgcgccgcctcctgactgtccgcccggtacactttcgcctggcactccgctctgatatcttcatccgcccacggcacgatattgacgctgccgtttgcgatctgcatatcaatggccgagaattcactgtctttaaattgaaaaatatgctgcacttcgtgtgcgtggccgaaattcagatcaagatccgcttccttcacttttttgacggcagaatcaatccagtcgaacagcttcgccccgagcgacggcttttggcttccttttgccccgctttcgaaatcttccgcaggttcctggacctccgcagataatgcggtgatctgctcttctttttctttatattcatgatccagtttttcaatgagcgtcagtgcttcctgcgccgtcagcatgccgtcttccacaagctttaaaatccgttctttctcctgtttcatacaaaactcctcccccgacttttcttacacctggcgtaacaccttaattccctgtatgatattccaaatgaccattccgatgaggatcagaaaataaacagctgctcctgttatcataacaaaaacgggcaccatactctccccctgagccgtaatcaatccgccgacaacacccgcggtcacaatcagcaatcccgcaaacggaatgatatgggaaatcagagcgcgcatggcatgccgcttcgtctctttttcatcgacgacaaagtaagccacaatcggaagaatgagcggcgcgagaaacacgctgaaataacagattgatgcgataatcgcttgatttcggttcaataaaaacactccctgtgccttgatgtaaaaacccttccttatacatacgtatgacgaatgggcgggtttcattttcatgctaaggacatgcttcgttatacgtaatttttgatttcagagatttcactatagaatcttttccccgaaccgattacaatatgtaacaaagcctgaccgtatgcaaggaggacatacaaatggagaaagatcccgaaaacgcccaagtaacggaagagagtctgcgaaatttaattcgcgaacagaaaagaatgaacagcgaaatgctggctgaattggaacagatcaaagcagcccctcttcccatttcccatgatatccaatatataaaagtgctgctggacagcagcagcacccatattctgcaggacttaatgcatttaagcaaacagcttccccaacagaaaaaagcctgtaacacaacagcccaaaaccggtgagttttgggctgtttttattgatctattatgtggctgccgtttctttttcagccagcaatgttttcatccgttttttatcacgttccattaccggtttcagatagcggcccgtatatgattcttccacttcgacaacttcttcaggcgtcccggaggctacgatcgtgccgccgcccgctccgccttcaggtcccaggtctacgatgtagtccgccgttttaatgatgtcgagattgtgttcaatgaccaaaacggtatcaccgttatcgacgagtctttgaagcacaaccaaaagccttgcgatatcatcaacgtggaggcctgtcgtcggttcgtccaaaatatacagcgtccggccggtggaacgcttatgcagttcggaagcgagcttgacgcgctgcgcttctccgcctgacagcgtcgtcgccggctggccgagcgtcacatacccgagtccgacatcggcaagcgtttgaagcttgcgtttgattttcgggatattttcaaagaaagacagagcatcttccaccgtcatatccaaaacgtcagaaatgctttttcctttgtatgtgacctccagcgtctcccggttgtaacgtttgccgtggcacacttcacacggaacgtacacgtcaggaaggaagtgcatctcaattttgatgatgccgtcgccgcggcaggcctcacagcgcccgccttttacattaaaactgaaccggccttttttatagccgcgcacctttgcttcatttgtctgcgcgaatacatcgcggatatcatcaaacacacccgtgtaagttgccggatttgatctcggtgtccggccgatcggcgcctggtcgatgtcgatcaccttatcaaggtggtcgaggcctttgatctctttatggcttcccggtttcgctttggctttatgaagcttttgcgcaagcgccttatgcagaatttcattcacaagcgtgctttttccggaaccggagacacctgtcaccgccgtaaaagtgccgagcgggaatttggcgttcgcttttttcaggttgttttctgaagcgcctttgatttcaatgaaccggccgtcaggctttcttctctccggcggcatcgggatgaattgagcccctgacaaatagcgtccggtcagagagtccgcatcattcatcacttcttcaggcgtccccgccgatatgacgcggccgccgtgaatgccggcgcccggaccgatatctatcaaataatcggcagccatcatcgtatcctcatcatgctcaacgacaatcagtgtgttgccgagatccctcatgtttttcagcgcgctgattaaacggtcattgtcacgctggtgaaggccgatggacggctcatcaagaatatacaggacgcctgacaaacgggagccaatctgcgtcgcaagcctgatacgctgggcttctccgcctgacagcgttcccgccgcccggctcagcgtcagataatcaagaccgactttatctaagaagctgagccgctccacaatctctcttaaaattaaatcggcaatctgcatatctttctccgacagcgtcaggtttttgaaaaattccagcgcatcgccgacggaaagctcggtaatggttccgatatgacgcccgttgaccaaaacggcaagcgcttctttcttcagccggtagcctttgcacgtcgggcacgatttctgtgacatgtactgctccatctgttcacggatataatcggagcttgtctctttataccgtctctcaatattgcgcagcacaccttcaaattcaatttcattttcgcgcacttgtccgaaatcattctcgtatttaaagtaaatccgttcattgccgctgccgtacagcactttatcaagctgatgcttcggcaggtctttgaccggagtctccatatcaatgccgtaatggcggcagaccgcctgaagcagctgcggataatattgtgaactgatcggcgtccacggcgcgatggcgtgttcctttaatgacagctcgggattggggatgacgagctcagggtccacttccagcttcaagccgagaccgtcgcaagtcggacaggcgccgaacgggctgttaaacgaaaacagccggggttcaagctccccgatagaaaaaccgcacagcggacaggcgtgatgctcgctgaacatcagctcctcctgaccgatgacatctatcatgacacggccttcccctaaacggagcgcagtttccagcgagtcggaaagccgggcggcaacgccttccttgacaacgatccggtcaatgactacttcaatggaatgctttttgtttttttcaagttcaatatcgtcggaaagctcggccatttctccgtcaatccgcacccttacgtaaccttgctttctgatttggtcaagcactttgacatgggcgccttttctgcctgagatgatcggcgcaagcacttgaagcttcgtccgctccgaatattcaagaatccggtcaaccatctgttcaatcgtttgcgacgtaatttcaatgccgtgctccgggcagtgcggtttcccgactctcgcgtacagcagccggagataatcatagatctccgttaccgttccgacggttgaccgcggattgcggcttgtcgttttctggtcaatgctgatcgccggagaaagcccttcgatcgcatcaacgtccggcttatccatctgccctaaaaattggcgcgcataggcagaaagcgattcaacataccgcctctgtccttccgcgtaaatggtgtcaaaggcaagggatgattttcccgatccggacagccccgtcacgacgacgagctgatcccgcggaatcgttacatcaatgttttttaaattgtgcgcccttgcgcctttcacctcgatccggtcaattgccatgtgttcatcatccttccgctttaagctctaacagtaaatcacgaagctctgccgcccgctcgaaatcaagcgctctggccgcttctttcatttcgtgctccatttgctcaacgactttctggcgttctttcttcgtcatcttcgccagtttaggcgcggcttttgttttatattcttctttatcctcagcggcctgcgtcgcgcggatcacatcgcggatttccttattgatcgtttgcggcgtaatgccgtgaatttcgttaaagcgctcctgctgttcccggcggcgcttcgtttcattaatcgcgatttccatcgaattcgtgattttatcggcatacatgatgacgcggccttccgcgtttcgtgccgcccgtccgatcgtctgaatgagcgaacgttcagaacggaggaagccttctttatccgcatcgagaatggcgacaagtgacacttccggaatatcaagcccttccctcagcaggttgatgccgattaacacatcatgttttccgaggcggaggtcacggatgatttcaatccgttcaagcgtcttaatctcggaatgcagataattgaccttgatgccgatttccttgagataatcggtcagatcctctgacatttttttcgttaaagtcgtcacgagaacgcgttcattccgttctatcctcgcctgaatctcgccgatcagatcatcaatctgtccttcgatcggacggacgtcaatgaggggatcgaggagtcccgtcggtctgatgatctgctcgatcatttccggcgtatgctcaatttcatacggtcccggagtcgccgacacgtacacgatattgtgcatgtgtttctcaaattcctcgaatcggagcggacggttgtcaagcgctgacggcaggcggaacccgtgatcgactagcacctgttttctcgcctggtcaccgttgaacatgccgcgcacctgcggaatcgtcacatgtgattcatcaacgacaatcataaaatcgtccggaaaataatcaagcagcgtatatggcgtagagcccggcggacggagtgtcaaatgtcttgaatagttctcgatccctgagcaaaaacccatttcccgcatcatttcaagatcgtatctcgtccgctgctcaagccgctgcgcttcaaggagcttgccgttttcgtgcatcactttcaagcgctcctcaagctcctgttcaatattcagaatcgctttttccatcttttccgcccgggtgacgaagtgggaagccggaaaaatcgcgacatggtcacggtcgccgagaatttctccggtcaaagcgtcgacctctctgatccgctcaatttcgtctccgaaaaattccactctgatacaatgttcgtcacgggaagccgggaagatttccacaacgtctccgcgcacgcggaacgtcccgcgctgaaagtcgatatcattgcgggcatactggatatccacaagctttctcagcagctcgttccgctcaatctccatttccggtctgagcgacacaaccatctcccggtattcttcaggcgaaccgagaccgtatatgcatgacacactcgcgataataatgacatctctccgttcaaacagagaggatgtcgcggagtgtctcagtttatcaatttcatcattaatgcttgcgtctttctctataaaagtatccgtttgaggcacgtacgcctccggctgatagtaatcgtaatagctgacaaaatattcgacagcattgttcgggaaaaactccttaaactcgctgtacagctgtccggcaagggttttgttatgggcaatgaccagtgtcggtttattcacttctttaatcagattggacacggtaaaggttttgcccgtccctgtcgcacccaggagagtctggtgttttctgccttcctgtatgcctttgacaagcttctcaatcgcttgcggctgatctccctggggctgatatttcgagactaactcaaaacgatctttcacaaaaaagcctccgtttctttacgaaatcttcctattgatatagtaacacaatgacgggcaaaatcactaaaaatacgaactaaagttcgatggtttatttttaccaagtcaatttttgtataaaaaacctgcttttatggcgtaaaagcaggcattctatttcatattcaccatgtcaggcattgtctttctttttgtctgcttcttttttggccatgtacagccctccggccaccagcgatacgacatccaatccaacgataaaatacgtttcggtgtaaccctttaaataggatgcgaaaagcagtgctgctgtgagagcgatcgccacatagtggttaaacgtgacgcgcgtaaaaaggacgaccagcataaaagggaaacataatgcaaaaacggcttttgtaatcacaaaaaccctcctcgggaattcttcatctcatctgattatagtaaaaaatgaagaatcggacaatcgttcccctgctatcacaataccctttttcagcagtcttcaatcatctgtcaaaaaaaatgtgaatataaatccattgaaccattaaccagatgaatcgaattacctttcttcagccgaaaggatgagaaggtttaggtctttgtatctttgacagtttcttcctccctctttacaatgtaatgatagtgtttactatcattttcttggatgaagaaaaaaagggggtcataccgcatgtattcagtgcgatttcaaaaagcggaagaatcgagccgctctgcaggagcaaaaggaatgaacctgattaaactgacgaaaaacgggctgcccgttcccggcggtttcatcattcagacgaatgccctgacacgttttatggaagacaacgggcttcaagcagatcaggaacagatggagcgcgccattatgaacggcacgttttcaaaagagcttcgggaggaactgaccgcgtcgttttatgaattgagagaatcatacgcctctgtcgccgtacgttcctcctccgcgtccgaagatcttgaaggggcttctttcgcgggccagtacgaaacctatttaaatatcaaaacagaagaagagtttctcggaaaagtgaaagaatgctgggcttccttcttctcggcgcgggtcagcggttataaagagaaaatgaacaatgacaccgcagaaccgttaatgggcgttgtcgtgcaagggcttatcaattccgaggtttcaggagtcattttcagccgcaaccccgtcacacatgatgacggagagctgatgatcagcgcgagctacggtctcggagaagcaatcgtctccggcagcgtgacgcccgacacatttatcgtcaataaagacacatttcagattgaaaaagaaatcggcttaaaagaaatgtatatcgtttctaaagacgaaggcgtgacggaaaaagagacgaccgcagacatgagaaaccgcttctgccttgatgacgagagcatcaaagagcttgccatgctgacgataaagacggaagaactgtacggttatcccgtggatctcgaattcggatttgccgaaaataagctgtatctgcttcaggcccggccgattacaacgatcgcgcaggatcagaaagcggcagacgaagaacgggaatttatcatgacgccccgggatcagaaagagttttggctcaatatggaggccaatatagaaggccccgtcagcccgttattcgcctcactcattgtgccggctttggaatacggcctcaaagagagcacgaaggcattccctgtaatgggcatcgaaatcgagcgtgtcaaacttcatcagggccatgttttttccagacagcataagacggacgacaagctgcccgcagaacagttagaagcgcttttccccgtcttggctgaccgcatgtacgatattattcaggaaacctttctgcctttttatcaaaagctggacgaactggcgcatacagaccatacgccggagactgcccttaatgcgttccgaaacctgcaagacttctatttaaaaggatacgcagaacatttcaatattgtctttccgcaggttgcgttaaacatgatactggaatccatgtacggacaggttgagaaagaaaacacctcccttctgtacgaaatgctggctggcgtcatgaataagtcattggagactgacagacagctctggctgctgtccggacaagtaaaagacagccctgagctgcggcgcgtctttacggtttctcatgccgatgagctgcatcagacgcttctgcaatcaaatgagggaaaacgctttctcgaacaagtcggtgaatttttacaggaatacggctggagatccgtgaaaagtcatgatctgattgaagaaacttgggcggaaaacccttatttcgctttggccaacattcagaactatgtccggaacggatacaattttgacagtgagtttcataaaacgatagaaaaacgaaaacagctctacgccgactttatggatagaattgaagatgacggcttccgggagacgtttgaccgctattatcagtggacattgtcttcatccgtcatcaaagatgatcaccatttttatattgatgcgatgctggacgccaaagcgcgcctttgccttctgaaaatcggcgagctgcttcaaaaacaaggcgtaatcgatgatcgggaggatatgtggtacttatacagcgatgaagtcgagaaagcgctggcgtcgccggttccgatgcaggaaaaagccgctgaacgaaaacagctcttccagcaatatcaattgcttgaagcccccgcttatctcgggactccgacttcggaacagctgaaaatggctgaacagattaccggctccatcacagaagatgaaaaaaacactgaacatcaaatttacggacttgcggcgtcaagcggaatcgcaagcggccctgtgaaagtcattcgtgacgcaagtgaattttcccgtttttcaacaggagacgtgcttgtctgcaaaatgacgacaccgctgtggaccagtctgttccaggatgcaaaggccgtcattacggacacgggcggcatcctgtcacatgcggcgatcatcgcgagggaatacgggctcccggccgttctcggcacacgtgccgcgactgacaggctcaacgacggagatatcgtcacggtggacgggacaaacggcaagattacgattgtcaaacgcgcttcatgctaggtttccctctttattgacgggcagggcgggtgtatacttgtcctgccagtatttacgcgaggtgaaacatgttgagaacgacgaacaagagaattattgacgccgcgatgaatctgatcatccaaaaaggataccgcgcagcgacaacaaaagaaatcgcagaaaaagcaaaagtaagcgaagcaacgattttccgtaattttaaaaacaaacaaggattaatgaaagccatgattgaacagcagacgccggttccggaaagcatgatcactaaggcggaaggcgatctgtatgaggatcttcttcatttcgccgcgacccttcttcagcaattggaacaaaaaaaagaagtgttccgcatctgcctgcgcgaaccggaactattcgaagacgtcctgcaggatattgtcgtatatccgcaatccgtgaaaaagcatttaatcgtttactttaaggagctgacaaagaaaaatatgataagccccggcagtgaagaagctaatgcagacgtctttatgacgatgattttcggttattttatacaccggctgcagctggggaaaagagtcatcactctctctgaggaaacgatgctgaaacacagcactgagattttcatgaaaggcattaccggccggtcattttccggctccaaggaggatgaaggatgggttcaaagaaagaatgggcgctgatcgtttcgcttttgctgggagccatactcgttcccatcaattctacgatgatcgcagtcgccctttcatccatttcccgctcattcagcgaatcaattgccagcatcacatgggtagtgaccgtgtatttaatcgtgatggccgtgacacagcccattgccggcaagctcggtgatatgtacggaaacaaaaaaatgtatttatggggcgtcggcctttttctcatcgcatcattggggtgcgccctatcgccaagtcttttcttattgattttcttccgggcgcttcaggctgccggcggcgctttgcttacgccaaacagcatcgccatcatccgccatgtcgtgtctgaaaaacggcttccgaaagtattcggctttttcggcctcggtgccgggctgggcgcggctctcggtccgtttatcggctctcttttaattgagagcttcagctggcattcgatcttttgggtcaacattccgtttcttgcaatcgcactcgtgacggcattagtgatgtttcctaaatataaagaagaaacgtctgacgctccgcttgatatcatcgggtccgttttgcttgccggaagcattgtatctattattcttctgacgaaaaatgaaagctctttgggctattgggtgtacgcactgctcattctcgtatttgttccgctatttttcaggcgggagctgcgcacgaaacatccgattattgattttgatctgtttaaaaacacgacctttacgagcgccaatctgtcggttctgttaagcaatttaatgatgtacgccgtgttattgattatgccgctctttatgaccggccacttcagcatgaatacgtcacacagcggcatggcgctgtcagtcttttctgttttcatgtccgccagcaactggggcggagctcagctgcatcagaaatggggcgcgcgaagaatgatttttctgtccttcgggctgatggccgtagccaatctcttatttttgcttttggtttattcccattccgttccgtttcttatggcatcgcttatagtcggaggcatcgcgtcaggtgcggggctgacgagcatgcaggtatcttcccttgcgacggtagaaccgggcatgtccggcatcgcatccgggattttctccaccttccgttatttcggaagcattatttcttcagcactgatcggtttaatctccgggtttcatattctgtttatcatattgatcggagtttctgtgatcggcttgttcgtatcgcttggtatcaagtccggggacaccgttcagacgaaaaaaagccattcggcataacgaaaaaggttccgtaagcatctgctttccggaaccttttccagttttccttcttcattttctctctcaaagtgtcaccacaatgccgtttgctctatgagaaattttttatttacaagagaaaaggagaatgtaaatggctgagagttccgatcaagttcggcgctgacatcgtaatccggccgtaaaaaaagcccggccgccgtgttgttagaggcaccgggctttttatatgtgatttttcataattaataaaactgaaagcttattatttccaatgttttttcttaatttttttcataattctccttactaaaacctacctaaaacaattattgaatattacttttataattaagcaaaattaagtaacaatcattgaaggattctcagactgataaaatttattttaaatataatatttcaaaacacattcaaactgtacaaagaaaagaaagtctaaatttttatttttgtgagattctatctatagaagccacggttttgatcctccttctaaagttgagtcgcgtcactttagtagaatcataccgtggcttcccttgtcaaaaggcacagttcttttttacaccactacttgagactttaacgtttctctcatttgaattaattcaaaatagaattaatgggggagattacccccgtatttccaggcgatccaggtgggtggcctggtaaatattttgagtctctgtatctttaacaatagtatttacaatatcattaggataccgattcaaaaaaaaatgttctcctttaaacttatgaaatttcacgtttccttcaacaacttcactccatttatgcatttcattgatatgagtcgaaaaatcgctatccgcataaaaaacgcttactccacaacttattttttctgctttgggctgaaacttataattgtccaaaattataaaatctgctcgcaaaatcggaagaaacatatccataatctcttttgtataaaactcctctggtattcccccatattgttccacctttgtcaagaaagtttcattagtcatattttcaatgtcttctctcttttcaaaaatatgtggagcatctcgcccagaaaaaaacagatgccttggttccttagttcccatttgcttaagtttataatatatctcataagtcaataaggctcccatgctgtgtccaaatataacatattcatcgtcatattctaattgttcacttattcttttggcgatatcttcacttgcttcaccaacagactggtaacaaggctctgtgaatcgagttcctcttccagccaattcacatatacacaattcatatctatccggcagtagttttttccattcataatatgcatttaccgacgctccagcatatggaataggaaatacttttattttatttatttcactcactcctatgttcaacttgagcccactatcattactatataaacctataagtattcaagatacatttaattgtacttctctatctctcgctgctctgccagcaacaaattcaccatatcactatagctattcataccgtctgtctgattatttgccttcagatatacatcatttacatttcttgaaatacttgaaataacaccctcatacttatcccggtactgctcattttgttctatatcatgctgcaccgccttggacagactggacattatatcagacgcctgatctggatccactttctttagctcagatatagaataatcaaatgctagaaaaaaaccactgtaaagtatcattggatcatcctgctgcttacatgccagatatgctataaaatttgcctcatcctcatgcatgaaaccactctgatgtgccaattcatgtgccatagtagcaggcaccaagaaaacgggcacattaacattgatattggattcataagtaaaagggacaaagataccatttatccctgcatgcgacattagctttgacatcacaactggttttggtgttgagtataaagaatgctccaaaataggatattcctttgataacatttgcatcgagaacactgcgtgttgtgcataataatcaaaaacctccggtacttgagccaaaagatcagtgtccgctaacttttcccttgccaatcccatttcaacggcaagcgacttactcaatttgaccagttcctccttgctgtagttctcttctttatattcggtataagacaaaaaagaatatctgtaatagtttattccacccaaaatagtataacaaaaatatatcacgctacagatcgtaactattcctagagcaccacgataaactaccatcctacgtacacctttactcatgataaccttgcgcacataataaacgatataaaatagaaaaagtaacacaaccaacacgacgagccattcactaacagaaaacttgacccaagaaggtacaaatcctactatttttgacaataacggatatacagacctactgtatttttccgcccaatcctgatggttctgcgcgtatattgtcagtatgtaagctataactccaagtgaaatcaacggtaatctcttaagtaaaagcttttttataatgtactccccctatccaataaatatcagatgtacgccatgtaacctagtcatatcatttctttatttcaacatacttttcctcataaaaatcatgcttattagaaaaaacatattgattcataaaatctataggaagtacttcataagcccagtaggtaccattaggtctattacttgaaataacttgtcgggcgatttcagcagccactgtacccgttaactctgaactcgtttccatttgtaaattcaatctgcacctaacatcctttccatttttcactcctgtagcatcaatgactaaagctatccattcctctttaggttgctcctctaaacgaatgtctagttttttcagggcttcttcaaccgaagactcaagttgcatttgataaaattgcattgctaaacgaaaaatattatcatttgctgctatattgtaccagtggagttcttgtaccgaactaacttccagaatatcaatgatctcttgacttaaatacggtttcttatagacagggacatccacttcaggtacaaattctttcttcatcatatttatattttccgtttttacacaatgatcactccaataagaatctgtttttccaattacactatggccactcattaatatatctgagatagaagttttcgtataatgttccgcaccaccaatataacaattcacatacttcgtttcgtctaataaatgatttattactcgttttaatagcagacctgtaattccaggacaaaaaccagctcctatgtaatttacaccgttagctttaagctctatttgctcctgactcaataataaagcattggaagcatcgacatattttgctcctacttccatagctgcctgagcaactctatctttaattataaattcaggccctgcacaattaatgacaaccgtacaatcagtacagaacgcaatcaagttctcccagtcagaaacatccaggaattggtagttaaaattattaaggttcattaatgctgtaggttcacgccgctgtccgcccttaacaataaagtctttacataagttcttacagatgacttcaccgatcattccgccacacccaacaactgcgatttgctccatccgtacgacacccctttcatcttatacaagatttaaaatacaagactagttatacctttctctattaaaagatcattattatgtctactcaacatactcaatgcataaaatctttgtttggcttccattaatttatgatacgtgccgtgttcttcaattttcccattattcaataagacaatttcatcatatccactaagaattgattcatccagcctatgagtaatggaaattctcgtaatgccctgcatttcacttaacatacactcaaggtcactagctgtttgattgtccaacgctgaagtcgcctcgtccataagtaatataggtgattttctcaggagtgctcttgctatagaaattctctgtttttccccacctgaaaaatggattccattttctccacataatacatcaaagccgcctctgtcatgaatcaatttctgtaacatactcttctttattacttgctcaaactcatctgtgtcacattcacgaaacaatttaatattttgttcaatcgtatcatcaaagataaaacagtcctgatgaataaaactaacattttggaaaatggactgatcacttattttctcaagatcaaccccgtcatacctgatatttccttcatacccatcataaaacccagtcaacatctttaataaggttgtctttccactcccacttgttcctacaatggcataagactttccatattcaaattcaaaattaatatcatctaaaatttttttcccatctacgcttaacgaaagcccatttagagaaattttattactgaaattagggatatcaattctttgagtttgatccgtttttgcctctccaattttattgaaattcattaataaagcccgactggccttccttttggtaaaaccggttatgagtctattaatgggaactgttacacaatttaacaattgaatgaaagccataatctctcctactgtaatttctcctttcattagctgctgagtacccacaataaatatgactacagcaacaagaaaagttgaaatatcagtaagtgacataatgagtgacaacagattttcgtataccatttttgctttttcctgcttgttcgcctttgcctttgccctttcaaaaatctccttttcgatgttaaagctcttaacaacctgatttccagacaatatatctttaatgaaagatacataatttttattttgctcagccacttcaccttgtgctttttgcatacgattattaaatatactcgaaactgcaagtggaatgatacaagtgagtaatatactcaatgcaaggaatgaattaatgataaacatcgcaagcactccacctacaagcatagctagctgaacaaatatttccacggtcccttttatataatcgttttgaattatcgttatatcatttgacaatcgtgatatgtaggttccattactctccttgttgaaacttctcatatctaaccgcaaaatattttcaacaagggtatttttcaggtttaacgttgccctttttgtatataaatttttaacagcataccccacatacattcccactgcacctaaaggcaataaaataacggaaacagtagtcaccttaatgatattgtcaatatctttattaatagaataatcaataaacttttgtagtataattgccaatgcaataaacagaatagatgtcatgataccaagtaagcaggacaaaataaataagcctatattctttttgtatatgctttttgaaattttttcattcatactctaagcccccttcttgtttctaatttcatttagagcatgtctaatttacactccaattgtttattgctagatcatgtgcatatttcagatatgttgggtgggaccgcgagcatatgcacatgatctggcatcatatgtctttttatgacccctccacccgcatagcgggtggttttacgggtaagatacaacattaaatattcttcatgacatcattaaggagctcttcttcaattgtaatgcctgtaatgcgagcaattagagtactattttgaatgtaaaagtgcatgctaactccaaaatcttcagactctataatctgtgtttgtaaaaacatcttctcaagtgatatgtcatctctacttgcaaacttatcaaggactccctgataattaatgattggaatgcgacgggacatttcattaaaatcgtacttttgtgctataagaaacaacttttctgtaattgcagattgattaatactcgatttttctgatgttgataaaagctgtttttgcgttttacttttcctatcataaattgaataatctaaatttaaagttagccccaacatttccttattgaattcatctctgttatgtgtcaaaacagaaacagggatgttatttaattcttcaggtaagtcactatacataagccttgatataaattctactgctgtattaatgggttgttcgctaaatttctgatattgtaactcatttagttttacatgaatttctgtagacctcttagtgtctcgtcgagagaccaaatcagctgattgtttagcagcttcaatatactcttccatgttagactcttgagcatctggaatttccagttcgtcaactttctttttaatcattttgcaatattctatgaaagaatagttatagggagtggtaagtctgttgttcaaagtttcatgaagcataaccttaaacaaatcttgtgagactccatcccatattaaatgatgaattgcactaagtactaagcaatgatctgcatctatttctacgattaaaaatctagataacagcttatcatcagttagaaaactcatttcattcacaatttctttaaattgttctgcagataattctaaggttcctttcactactggaatttcccactcatctgaataatcgtattcttctaaataggtcattttttgatttaatttcgttcttaatgccccatgcctggaaattattcctctgagtgataaagaagcgttctctgccgttccttctattgttatgatttcagtaataatttctgtatccggtcgcaagaagtcctcatgtcctgtcaatacaggacattctaaagtagaacgtgttttaatatagttatctccataataattcaactgtttttgtatcatgcactttagatcgccatcacggttatcaccaattaatgtttcatctaatggcatttttactgttccttttctggttaaacacgtttcgacaacatccttaattgctctttcatatgccaataccaatgtttgagcatcctcgtcagtatacaatccagtatcatatatgatgtcaaattcaagttgcccatttaaaacagccccatttagagacaatcccattcctgatgaatttttttctgacatacttcttcctaatggcattcccgacatggatattccttcaattctgtctatctcgttatccaattctccaagataattgaatgttattgctgcgctcatctcaagtccgctatgctcaccaagatatctcaaaactccatatccaattccatgattagggacctgtttcaatgtttgttttgtctccaaaatgctttcttcaacagtatcttttgtctccaaaataataggatatacacttgtaaaccaaccaactgtacgatcgatggcgatctctctatctattgtctctctcccgtgaccctccatttctatggttaggtacttagagtttctccattcttttactgcaatggtcagcgatgccagtaacaagtcgtttatttctgttttatatgtctttccagcttcgagcaacagctttttcgtcgtttcagagtccactttcactactttatttttatattgaccacttgctgtttgtgtactcttgaatgtctcagtactatttgatttatccgatatatttttccagtatgctatttcatctgaaagcacttcactcttagcatattgtgttaaagcattcgcccattccttgtacgaagccgttttcattggcagcgtgattttacctgtctcttgtatttgtcgatatccactaaataaatcctccagcagaattctccatgatacaccgtctatgaccagatgatgtacacaaattagtaaatgatctccactgtctgaatggaacagccctacttttaccaaaggcccggtggctaggtctatgcttgcctgtaatttatcgctggcatactctatctctttcgatacatcttgcacttttgtataatctttttcataccaatcatatagcttgctttcctctgtagacagcgtgatttgacgttgtccgtcatatacatttcttaaagcgtcatgatgtttaatgatttcagtaattgctgtctttaaactaggtatgtcaaatggctcatcacttcttaacattaaggcctgattataatgattaggcacgacgtgattcttattgaaaaattctagttgtataggggttaatggactttccccattgatttctccctgttcgtatacttgatttacttctcccatttgaatattttccccaatctttcttggggtctgctgatacattaatgcggcgaaagaaagcttataacctttttcccgtaacttcgaaacggccttaatcgctttaatagaatctccgccaagttcaaagaaactgtcttctattccgactggagatattcctaagatttcttcaaatatgtccgtaatgactttctctgttttagttcttggtggcatatattcctgtcctgctaatgcatttagttctggcagtgcttttgcatccagcttcccatttggagtcagtggcaaggcatcaatctgcatcataaagccaggtaacatatactcaggcagtttgtctctcaaatcatttttgatttcagacatatccagttgctgctcttgatttgtcgggatcaggtaggcacatatactcttgtcaccgcctacttccaatgcaacaacggctacatcagatatacccggctgattccttagaacgctctcgatctcgtacaactcgatccgatatcctcggattttaacctgttcatctattcttcccaggtattccatctctccgttaggcagccatctcgccaaatctccagagcggtataacttcccttcgccatatggattgtcgataaacttctccgctgttaattcaggctggtttagatagcctttggctactccgtctcctgcgatgcatagctcaccaggaacgcctacaccacataactccatctcattcagtatatagagctgcatattggcaatgggatgtccgattcctacacttaaacccttatctttttcgctggaatagacatagtcacagcatcctacggtagtctctgtagggccatattcgttatggatcttgacgctttcacccaatagcttctgcgttttccacgccgtatctgtggtgaactcctctccaccgacaatcagcgtttctaaattcgccacatctacgccgtctgcataggtttccagcatttttaaatgtgacggggtaagcttcaggaaggttaccctgttatcttttaaagctgcacgtaacctttcctccgtatctcctccctttaatagaagagatccaccactaatcagcggtaagaacaaggacgttacggagaggtcgaaacttaagcttgtcattaataccgtcgtacaagcttccttctggtactctttatctgcatacgacaagtaatgatccaagttacctcgtgtaaccgccacgcctttgggctttcctgtcgttcctgatgtgtaaatcaaataggctatgtcacttttttcaacagcacacgctggatttgtctccttctcacccagatcttcaagattcatcgagatgaatgggacttccgtttccatagtcttctctcttgttaaaatgaccttgggtgctgcatcgtttaagatatgctctattcgttccttcggagtcgctggatcaatcgggacataggaagctccactctttagcacgcctaaaatgccaatgatcgtttccgctcccagtgaagccatgatggccactcgatcattgggctggacacctaacgaaatcagttcccatgccaatgcattggcctttcggttgacttctccataacgaagtactcccgtttcgtattcgattaccgtcttctcgggtgtctgttccgcatgtttctcgaatcgttctactgccgtattattctgtgcatactccgtatgggtatcattgaaaaccgttagtattctttgttgctctacctcactgaccatgtggagttcagacaatttcatttcagggttagcaatcaccctgtccagcaacaccttaaaatgctccagtatgacctgtgctgaagtctcggtaaataaatcactgcaatataccagatctaaagcgtacccctcttcatacgctgtagcttgtaaatccaaatcaaatttggcatcaatgaaaggaatgcccagcatctctacctgtgcttcgcccatcgcaagatggatttcctcgttattctgcatggtaaacatcacgtcaaacagcggattgcgtgacagatcacggcgtacttctacttcctctaccaattcttcaaacgggtattcttgattctcatatgcattcaatgccaactctttgatctcgcttaaaaattctaagaacgttttttcagcccttggatatcctctcattgccagcgtattgacaaacatgccggctattgtctcggtgtcctgatgcactcggcctgagatgggtgttcctaccacgatatcttgttgcctgctgtatttatgcagttctatcataaatacagccagtaaggtcatgtaatctgtcgttccctgttgtttatttatattttgaatgccagctttctgctctcggctaagctgaacagacacttgggctcctttgtagctttggattttgggacgtggatagtccgtcaccaaatccaaaaccggtgcctcttctttgaatacttctttccaatagtttctctgactctccaggtttctgccacgcatccattcactataatccttgtattggatttcaagtggttgtaattcttcaccgttatacaatcgtgagaaatcttcgattaatagatttagcgtctgatgatcggaaataatatggtgcatatcaaatagtaaaatatagttgttctgatttctttctttgactactttaaaacgcatgagcggtgctgttccgatgtcaaacgggcgtacaaattgttccatgtcagcgtcactgtagctgtcggtctcttcatattccacttggtagaatacctcgtctgcaatgacttgatatgctccttcttcggtcattacaaaacttgttcgcagcgactcatgacgcttaatcagacgatctatggcttgttgtattttttctaaatcaaggttacccgttacttctagcgctgacgccatgttatatgcagtactgttgccttccatctgatccagaataaacaatcgtttctgtgtagaggatgctggataagcttctctctgttctgcttgtggtattggactatattcgccttctcccgcggcctcaatctttctcgacaacatgacaggagttggtgaactaaatatatctttgactggcaaacgaatccctgtcttcttctcgatggcattaatggctgccgtcgcttttaacgaatgtcctcccagttcaaagaaactgtcttctattccgactggagatattcctaagatttcttcaaatatgtccgtaatgactttctctgttttagttcttggtggcatatattcctgtcctgctaatgcatttggttctggcagtgcttttgcatccagcttcccatttggagtcagtggcaaggcatcaatctgcatcataaagccaggtaacatatactcaggcagtttgtctctcaaatcatttttgatttcagacatatccagttgctgctcttgatttgtcgggatcaggtaggcacatatactcttgtcaccgcctacttccaatgcaacaacggctacatcagatatacccggctgattccttagaacgctctcgatctcgtacaactcgatccgatatcctcggattttaacctgttcatctattcttcccaggtattccatctctccgttaggcagccatctcgccaaatctccagagcggtataacttcccttcgccatatggattgtcgataaacttctccgctgttaattcaggctggtttagatagcctttggctactccgtctcctgcgatgcatagctcaccaggaacgcctacaccacataactccatctcattcagtatatagagctgcatattggcaatgggatgtccgattcctacacttaaacccttatctttttcgctggaatagacatagtcacagcatcctacggtagtctctgtagggccatattcgttatggatcttgacgctttcacccaatagcttctgcgttttccacgccgtatctgtggtgaactcctctccaccgacaatcagcgtttctaaattcgccacatctacgccgtctgcataggtttccagcatttttaaatgtgacggggtaagcttcaggaaggttaccctgttatcttttaaagctgcacgtaacctttcctccgtatctcctccctttaatagaagagatccaccactaatcagcggtaagaacaaggacgttacggagaggtcgaaacttaagcttgtcattaataccgtcgtacaagcttccttctggtactctttatctgcatacgacaagtaatgatccaagttacctcgtgtaaccgccacgcctttgggctttcctgtcgttcctgatgtgtaaatcaaataggctatgtcacttttttcaacagcacacgctggatttgtctccttctcacccagatcttcaagattcatcgagatgaatgggacttccgtttccatagtcttctctcttgttaaaatgaccttgggtgctgcatcgtttaagatatgctctattcgttccttcggtgttgctggatcaatcgggacataggcggctccactctttagcacgcccaaaatgccaatgatcgtttccgcttccagggtagtcatgatggccactcgatcattgggctgaacacctaacgaaatcagttcccatgccaatgcattggccttgcggttgacttctccataacgaagtactcccgtttcgtattcgattaccgtcttctcgggtgtctgttccgcatgtttctcgaatcgttccactgccgtatgatgctgtgcatactccgtatgctccgtatgggtattattgaaaaccgttagtattctttgttggtctacctcactgaccatgtgtagttcagacaatttcatatcagggttagcaatcactctatccagcaataccttaaaatgctccagtatgacctgtgctgaagtctgggtaaataaatcactgcaatataccagatctaaagcgtacccctcttcatgcgctgtcgcttgcaaatccaaatcgaatttggcatcaataaaatgaatgcccaacatgtctacttgggcttcgcccatcgcaagatggatatcttcgtcattctgcatggtaaacatcacgtcaaacagcggattgcgtgacagatcacggcgtacttctacttcctctaccaattcttcaaatgggtattcctgattctcatacgcgtttaaggccagctcttttatctcgcttaaaaactccaggaacgttttctcgccccttggatatcctctcattgccagcgtattgacaaacatgcctgcgatcgtctcggtgtcctgatgcaccctgccggagatgggtgttcctaccactatatcttgttgcctgctgtatttatgcagttctatcataaatacagccagtaaggtcatgtaatctgtcgttccattttgtttatttatattttcaattccaactttttgttctttactaagttgaacagacacttgtgctcctttgtaactttgggttttcggacgtggatagtccgtcaccaaatccaaaaccggtgcctcttctttaaatacttctttccaataatccctctgactctccaggtttctgccacgcatccattcactataatctttgtattggagttcaagtggttgtaactcttcaccgttatacaatcgtgagaaatcttcgattaatagattgagcgtctgatgatcggaaataatatggtgcatatcaaatagtaaaatatatttgttccgatttctttctttcactactttaaaacgcatgagcggtgctgttccgatgtcaaacgggcgtacgaattgttccatgtcagcgtcactgtagctgttggtctcttcatattccacttggtagaatacctcgtctgcaatgacttgaagggtttctccttctgtcatgacaaaacttgttcgcagcgactcatgacgctggatcaggcgatctatggcttgttgtattttttctacatcaaggttacccgttacttctagcgctgacgccatgttatatgctgtactgttgccttccatctgatccagaataaacaatcgtttctgtgtagaggatgctggataagcttctctctgttctgcttgtggtattggactatattcaccttctcccgcggcctcaatctttctcgccaacatggaaggagttggtgaactaaatatctcttttactggcaaacgaattcctgtcttcttctcgatggcattaatggctgccgtcgcttttaacgaatgtccacccagttcaaagaaactatcctctatgccgactggagatattcctaagatttcttcaaatacatctacgattgcctgctccgtcttattacttggtggtacgtagttcaaactttctaacatatctggctctggcagcctagttttatccagcttcccatttatggttagtggaaattcatcgatctggatcataaaggcaggaatcatatactctgttacttcttctcttaccgcttctttaatttggggtatacttagttcctgccccttttctgcaatgagatatgcacagagaatatcatcatttccaacttcttttacaataacgacagcatctgcaatattactctgctttcttaatacactttcaatttcacctaactctatcctgtaaccacggactttcacttgttcatcatctattcgacctaaatactctatatttccatctggctgccaacgtgctaaatctcctgtacggtacagttttccttcaccgaagggattcttaataaacttcttatctgtcaattctggctgatttaaataacctcttgctaaaccatctcctgcaatacacaactcaccaggtattccaatcccgcatagctccatttcatttagaagatatacctttgtatttgcaatcggacgtccaatggaaattgaagtagagtctgtattcactctaaaactagttgcatttacagtagactccgtaggcccatatgtgttaagcacttctactctttccgcccatttttttaagctttctagactacctgcctctccacctgactccagcaaacgaagcgtcggtaatgcgtcaacacacaacccgtctattaacttaggtgtcaatgaagctgttgtaacattatttcgatcgatatatttttgtagttgctccatatcataggttaaatgttttggtacaatgcataatgccgcaccattgcatagtgcagggaagatatctcccaccgcttggtcaaaagatatatttgcaaattgcagcaccgtatccttgtcgcttagtgcaaatgtctcctgatatgtgacccacatattgaccacatttcgatgttcaattaaaactcctttaggatttccagttgtacccgaggtgtagatacaatacactaaatcattagacctgttaacgtgcaaaagattgtccgtttcattagcataattattctcatcttctaaatctaatactggtatctctaccttccctagcagcttattcttatacgtcaatacaatctttggactactgtcctccagcatatagtgaattctattatctggatattcaggattgatgggtacataagctccccctgccttgatgatggctaatatccctacaatcatttccatgctgcgttctgtcactagagccactagatcgtttggagccactcctaaatcccgaagagttcgcgccaactgatttgctctttcattcagctcggcatatgtcatcttattatcatcaaatttaagtgcaatatttcctgctgttttctctacctgattctcaaataagctgacagctgtttgttctcgagagtattctacattcgttgcattgaaatcaaccaagatcttctcttgttctctgagatcaagcatatgcagatctttaagctttttgcctggatgtgttatggcttcctcaagcagcgttacataatgccttgccatatattcgatcgtttcttgtttgaataaatctgtgcaatactcaaaatctatctcatacccttctggcatacattcaaccagaacggataagtcaaactttgagacatttcttttaatgaatgcactttttccgcccaataggccttgcatttccgtcggttttttcttttcttttaatccgaacataaaatcaaaaattggatttcttgagagatctcttttttcctctacggcttcaactaaatcttcaaattggtattcttggttatcataagcctgcagacacttctccttcacagctaatatcaaatgctcaaaggtctcatccggactaacttctcccttgatcaccagagtattgacaaacatccccaacatacccttagtatctgcatgaactcggcctgacacggtagttcctacaataatatccttttggcgactatatttggctaataataaaatgaacacagatagggtaaccataaattcagtagcaccatgctttagagctagatttttaacccctgagcttaatggctcctttacctttgctacaacattgtctcccctgaaagactggatttgaggacggaggaaatccgtcttcaaatccaccctagcaatttcaccagcgaattccctcttccaatactcttcctgttttgagatgtcataaaaattctgccatacactgaaatctttatactgaacacggttagaatttttattcataagttctcctcttattcataatcagttccatcattttcataaaattcgttcacttgttgcagtataactggcaggctttctccatcacatataatgtgatgaatatcaacaaatagataggaggccgttgttgtcttcattaatttcacacgcatcaacggtgcttcggataaaacaaacggttgtataaatttatcgtattctgtttgtatatctatttcgtccacttcgctgtagtctattaaaacccttgcgtctggagaaatcgtttgaataggctcaccgtccacaacatggaaactagttcgcaagatttcttcttgctttaacagcttatccaaagccttctgtaatctttctttatctagcggttcttcataagcataaacgtccgatacgttgtagttaatattaggtccggtcatctcgtccagaagatagagtcgtttctgagctgaacttgtagggtagtattcagctgctgaagcttgttctattgccacaaacatctcgctctcaatcgactcgatatttcccgctatctgctcgggcgtaccaaaattaaaaacatctctaattgacaatcttactcctatggccttctccaattcattgcacaagagcactgctttcagtgacgatccccctagatcaaagaagctatcagttacactgactttttcaatatctagaatgttctcaaatgcctgcacgatcagagtttcatattcatttcgtggtgcaatatattcctttgacttatactgcggctggggtaatgaggctttgtcaagtttcccattacttgtaagtggaatcgcatcaaccgaaataatatgtgcaggcaccatgtaatctggtaatactttacttaacttgatcttaacgtccttttcttctatttctgtctcagttattacataggcacacaggaatttctcattccttttgtcttctcgcactatgactacagcttcatttatgccttcaagctccaataaacggctttctacttctcgtggttcaatacgatatcctctgatttttgcttggtcatccatccgtccaatatattcaatgtttccgttaggtaaccaacgtgccaaatcacctgtccgatacatctttccggatccaaatgggttgtgtacaaacttctcgtctgtcagttcttgtcgatttaaatatccttgagatacaccctcacctgttatacatacctcacccggaactccaattccacaaagttcatttccatttaatatataaatctttaatgttggaagtggcattcctatatcgctaattcctctctcgatggcttcagcatcaatatcgcgataagtagcgtataccgtggtttctgttggcccgtacatattaaccagacgacaatgtctattgttctcatgccatttcttcaaatgtgctggataaagtgcctcccctgcaaaaataacatatcgtaaactatttatggtttgtcctgtcgttgcatcgatcaacgcatagaatggtgaaggtacctggcataagatggttaccgcttctttttggagcagctctccgaaggcatatccatcttttactgtatcctcagaaggtattacaagctttgctccattcaatagacttccgaatatttcccaaaccgaaacatcaaaacaataagaatggaattgaacccaaatatcattttcatataaatcaagcttaaacttgtcattcttgagtaatcgcactacatttacatgctgaaccataacaccttttggccggcccgtcgtacctgaggtataaataacatacatcaaatcacttgagtgatttacatgaacaaggttactgcattccatttgataatttgcctcatcatgaagatgcatgacaggaatgtcaacttcaggttcttttgtactgcataatacgacctttggtttacagtcattaatgatataattaattctttcctctggataagatggatcaaccggtacgtaagctgctccagcctttaaaatagcgtatatacccaccaccatctccaaacacttctctgttgagatcaccacaaagtcattgggttgaatgttatagtcctcacgaagctttcttgccagagcattcgcccgttcatttaattgtgcataggtcatctgttgtccattaaatgtgatggctatactattaggtattctggcggcctgctcttcaagtaactgcacaatcgtcatattttgagggaattctgcatccgtcatattgaactcacccaatatttttgcttcttcgtacagatctaccatggcaatctcctgcagcttcttttccggagacattaaaactccttcaattaatgttaagaagtgttttgccatgtactcgatcgtttctggtttgaataagtctgtagaatattcaaaatcaatcttatagccttctgcatcacttatcatggttaaggtaagatcaaatttagaaatactaccttcaacggattcccttgttccaatatgaatacgatccgaataactctctctctcatcgtcctgcaatacaaacatcacatcaaatactgggtttcttgagaaatctctctttactcccactgcttcaactaaatcctcgaactgataatccttgttatcgtatgcctgtaaacatttctcttttgtacgtaataatacatcctcaaatgtatcatcagcgcacacattccctttgattgccagagtgtttacaaacatgcccaacatattttgggtatccgtatggtttcggcccgatattggcgttcctactataatttcttcctgtcgactgtattttcctaacatagagaaaaaggtggataacaacaccataaactccgttgcaccatacttcttcgctaactcttttactttaatactcgttttttcttctacctgtgttcggaaattagcacctctaaagctttgtttatgagggcgtggataatccatgattaaatccaggactggtatatcaccggagaattctttcttccagtacgctgcctgttctgtgatatctctagcattttgccaagcagaaaagtctttatactgtactcgtggtgttaacaattctcttccttcatataactcttgtattttgtaaagcataactggcatgcttcctgcatcacataaaatatggtgaatatccaggaataaatatgaatcacttggagtattcagtatttttgcacgcattagtggtgattttgacaggtcaaatggttggacgaaagtattatattcatcttggatatactgtgaatctgctgtctttacttcactgtgctccagcacaattcttgcatctgaagaaattttttgaattggttcaccattcacgatatggaaacttgtccttaaaatttcctcatgctctactaattgatccaatgccctctgaagtcgctcattgtctggtttaactttaagcttgattactaaaggaatattataagttataccagggcctgttagttggtccaaaagataaagtctcttttgagctgaacttatagaatagctttctgcttctgctatttctggtatttcttcaaacgtattctcctttgagttttttatttgttctgcaatattttttggtgtaactaaatcaaaaatttctctaagtggtaaccttacccctgtgctcttctctaattcattacacagccggattacattaagcgagtatccacccaaatcaaagaaattgtcatttacacttactctttccataccaagtacatgttcaaatgcctctactaccaatttttccgtctgggtctttggtgcctcataaccccttatcatcttagtttcttcaataaactgttccgggttcggcaataatttacgatctactttaccatttgcagatagtggaatctcatctacctgtatgaattgtgccgggatcatataatcaggcagatgtttggctaactctctttttatttctgccaattctacggtctcatctgcaacaatatacccacacaattgcttctctccatgtgaatcactgtaatcagcgacgacggactgctgaatatgtggcaaatgattgatacagtgttctatttctcctagttcgacacgatgtccacgtatcttaacttgactatcttttcttcccaggaagtctacatatccttccggacgcatgacaccataatcacctgttttgtacagataacctaatctatggttgataaaggcggccttcgtcttctcttcttcattgagataacctgcggcgactccttttccaccaatatgcagttctcctggtacacctactgggcattcttccccacattcatccagtacgtaaatttgttgatttttcagcggatagccgtaagggatacttttccactctggcttcacttctgtgattgggaaatatatggaccatatagagccttccgttgctccacctaacccgatgacttgtgcttttggcattcttgttttgattttcgctggcaaaccaagagaaatccagtctccacttagcatcaccatacgtaagcgctctgctgaagtgctatgcaccgtgtcttgctttgtgctttctagatacatatccataattgccggaaccgaattccatatcgtgatttcttcttcgatcatgatctgatgaatactggccatatctaaaagatctggaattaatactaactgagctccgctaatgagtgctccaaaaatatcatagacggataaatcaaagctcatcgatgatagggcaatgattttatcttcgctatttacttggaatttctcattaatatctaataatgtattcactactgcttcatgggtgatcacaacacccttaggatgtccagtgcttcctgacgtatagatagcataggctctatcctgctggcagccttctaacagttctaaggcgccatcgttataggtggaaaggttctctgtttcatataaatccggatgaatcatgagcttgatatcactatgttccacgatatattttattctttcctcaggatgttccggattaacaggaatataagcatggccggcttttaaaatagctaccatatttacaatggtctcaattcgtctctctgcccaaactccaatataagaattgagcgcatagttttgttctgctaaataacgagcgacctgattggattttctcgccaactcgccataggtcaatgtatcctgtcctaatttgactgcaatagcatctggcgtcttctggcattgctggtctattaatctttgcagtaaatccccttcatagtctccttgtgtacgattgtaatcaagcagaagttcagactgtgttacaggcagcggcatagatgaaagtttattgtctataacttgctgtaatcgaagttgatacgtttcaaacatggcactgatcatgtcttcatcaaacaaatcttttgcataatcccaagtcataattaattgtccgtctctttccgtgacttggaagtccaaaaacacttcaggggtctgatttattccgtatttcaattctcccctactacctatattggcattgaaaaaatctacttcgtcacgaagcatactcgtaaatacaattggcattatagcttgaccttcttgaccacggtgttcagccagatcacgcaggaaatcaaccccactgtaaaatctgtggtctaacgcttcaaataaccgattctgaatctcagtagttctttcccaaaatggtctatgagatgataaatcgatatctaacaacaatttcgatacgaaatcccccatcagagacattccatcttgatgaaaaggctgattactaaacagatttaagctaagtgccatattggattgattgctccatttaaatagaacttccgcatatattgtgcacaataacgcagatggtgcaattttgttatccaaagccttgtttctcacaatcgcccagtctgtcgcagcaattctcgtttctaaacgttttactgttgcgttgtttacagcattcccatttggaagaagtggtaactgaggtgcatgcgggaaattgtctactttttccttccaataagcttgatctctttgctgcaatgcccgcatcaaatctgaaacttgctgtgccagatgattggcacgatgatcaagctctgcttgggtcgaatctttctcctctttcttaacatcctctttcttaagtagctcttgcaaacggtcttctggatgttttataacttctgatagtaataaaacataatcatccagcatttgctttatcgtttcctgtttaaataaatctgtagaatactctaagttgaccacataaccctctgatgtgtgtattaccattaaattcagatcaaacttagctacttttccttccattggtacccatgttccactcacaatgctctttgaaccagacataatttcactctctggcatcatgaacattacatcaaataatggatttcttgataaatctctctttacatctactgcctcaactaagtcttcatattgaaagtcctgattatcgtacgcacgaagacatttttcttttactccaagcaatacttgttcaaaactctcctcttgtttcacttttcctttgatagccaaagagtttacaaacatccccagcatttcttgtgtatcaacgtgggttctacctgatacaggagttccgactacaatttcttcctgttgactgtatttgctcaatagaatcataaaggttgataacatagtcatgaattccgtagcaccatgcttcttcgctaattcttttatttccataaaaactggttcttcaatcttagtttttacgttggcaccattgaagctctttttcttaggacgttggaaatctgtattcaaattaagtattggaatttcgcctaaaaactcgtttttccaatatgccgcctgcttcgtaatatcctgagtcatttgccaagcagagaaatctttataatgaagccttgggattggtaaagtatttccttcatataactcgcttatccagttcatcataataggcagactttctccatcagaaacaatatgatgaatatccagcatcaagtatgaagcttgtggtgtctgtaataacttaacccgcatcaaaggtgctttgaataaatcaaatggtgaaacaaaacgatcatattcatcttgaatatctagtgtatctgcttctttgtattccaatactactctcgcatctggttgaatcacttgaactggctctccattaataagatggaagctggttcttaatacttcttctctctctaagagcttatctaatgctccctgtaactgctctttatccagagtgttttcgtattttatgacgttcgaaatgttataggaaatactaggacctactatctcattgagaagataaagtcgcttttgaacagaactcataggatagaactctgcttcagctattttcggtatttccgaaaaacgatcctgttgtaagcttccaattctttctgcaatacgttttggtgtagataaagcaaatatttcactaagctgcagtcttataccgattgtcttttctaattcattacacaataatgtaactttcagtgaatgaccacccaagtcaaaaaagctatcattgacactaattcctgttattccaaggactttctcaaatgcttcaactattaacttctcttctctatttattggtgctacatattccttgggcttgtattctggttctggtagtgccgctttgtccagctttccattatgacttaatggaatttggtcaattcgaataatatacacaggaaccatatagtctggtaacttcttgcgtaattcactcttgattgtatcttcgtctaattcttctatttctgtatgaacgactacataagcacacagatatttttctccttgcttgtcttgtcgtactacaacggctgctctactaactccttcgagctccatcaaagtactttcaatttctcctggttcgattctgaaacctcttatcttaacttgatcatctatacggccaaggtactcgatatttccatccggtatccaccgtgccagatcacctgttttatacatcattcctgaaccaaaaggatttttaataaatttctgagctgataattcttcacggtttaagtatccacgcgacacactttctcctgcaatacataattcccctggtacacctattccggctattttttcatttgataatatataaatttgtgtattactaataggcttaccaattaatattttatctacatctaagcctgttggacaatgatatccactggaattaactgtagtttctgctggaccatagagattcagtagttctgctcttacttgtcctttttcccttaattgattataatgtctcacactttccgcattcagtttctcaccaatattaatgatataacgcagagtatttattttttctttgctcatatctaattcttctagaaacatattgaacatggaaggaacgaactggattgcattgactttataatcctgaattaccttgatgatcttatcactttgactttcttctccttgttgcaaaataacaagtttaccacccgctaacatccaccaaaatacttcccaggcaaaaacatcaaatgcacaagtggtcttcattaaaagagattctccctcgtgtaatgggtattctctttgtgtccacatctgctgattgactatattctgatgctctaccataaccccttttggttttcctgttgtacccgatgtataaaccagataaataagatcacgaggagtatttacatgttctagattccctgcaccttctccataattgctttcactatataagttaacaaccttttcaggagaaatattatactttccatgaccaattaaaaccgctttaggctggctatcttccaatatatactcgatacgttcttctggatacaatgggtcaatgggtacatatgctgcacccgactttatgatggcatataacccgatcaccatctccaaacttctttctgctataatcgcaacaaaatcatcaggctggacatggtattcccgtcgtaactttaatgaaagctgattggcacgagcatttaattcagcgtaactcaattgctcattcccgcatacaactgctgtattatggggggttcttgctacttgttcttcaaataattgtacaattgtcttgtctcttggatagtcgctgtccgttgcgttaaactgtactaattctttcatttcttctgcttcactggtcatgcctaattcgattaatttcgtctgtggtgctgcaattgcttgttccataagcctttgcagatgggaaccaataatgtttatttgttccttgttatatagctttgtactgaaaagaattctaaaatggatacgatcactcttaaatgctgtcattcccaagtcatacccaatttgttcgcggtaatattcggattccacatttaatttgccatcaatatttatacttgttccttgataaccttcaaagaagaataatgttccaattagatctcttcctaataaagtatgattctgtatttctgctaagggaagaaaatcgtgttcatttgcaataattgcctggctctgtaatgatttcaacaaatcggcaaaggtgtcttcgtttgttgtcgatatacgtacgggtattgtattgataaataaaccaacgatttcttcaatatcttcaatctctgcatttctaccagatacaacttttccaaatacaacatcatttgttgagttgtatttttccaataaaacgccccaacaagcttctactagcgtgttcaatgttacatcatattgggcacatatcgcttctgcttgttcagttacctctatgcttaacttaaactcttggctctgactctcttcttctgtttcatctggacgacctaaaggtagaatatcagcccttgtctcatatccttgaagaaggtcttcccaatatttaaggctcgtctctttatctttttcatttatataatggacaaacttttcatagctacccattttattagaagcagcctgattaggtgtttttaattgttcttcatctgttgccatatacgcactaaataattctttacgcaaaattggcaaacaccaaccatctaaaataatatgatggtttgtcatgatcaaccgataaccactgttgtttatttttatcagattcatacgaagtagtgtatcttcttctaaatcaaatcctcgttttacatcttgttcctttaaatcaagataatccgattcattatctacttccatataattaaattccggcattctttctttcaatacaacttgtcttggtacacttactccccgataacagatttttgtacgtaaaatatcatgctgtgttgctaaatacttaaaagctttgtgcatcttctctacatctacatctgccaatcgcaacgtctgctgaacaacatattttgtagatgattcatccataagcttctcatagagcattccctcttgcacaggagccaatggatagatacgttgaatttcctggccgcggatttcgacagcttcctgtacataacaaaattcgctatctttccatacgctctcaccaaaatcacttgccgttgactcactcttctgtgcgtgggagcaatgttctgcgactgctatcagttcttcttcatatgcttttcctatttgctcaattctctcagccaaataacgactgctgttgcaggttactgtcatagataaactacctttttgcacatgacctatgacgttaatggatggtccaaattgattacgaggattcgtatcctgtccataacctaattgtgaaaactcgaaatatagatcgccagattctttctttgttcctagttctccaagataattaaatgatatatctggtgccacttctacatccatttcttctggattacccatggctgcattctttatgatgccataatcaattccatgtcctggtacgcgtcgtagtgtctctttcgtatttcgaatatcctgtgcaatattagtgcctaactcatctaaaactacgggatatatactagtgaaccatcctattgtcctacctaaatcaaaagagcctactgtttcttcacgaccatgtccttccatctgtatagcaagcgttctctgacctgttactttgtttaccgcacgtcctagtgctgctacaagcaagtcattaatctctgtattataagcatgtgcactttcttttaataacttttctgtgatagcggcattaagacatgccacggctgtctttggttcgaatttatcatcaattccatcttcttttaacttaccatcaaccaatttattttctatttctgaccagtaagctaaccttctctttaacttttcactctggctgtaataagctaatccttcgctccatactttaaaggaaacggttttagctggtaatgttatctctttttgattcaaagcttgagagtagcccttctccaaatcctcagttaaaatccgccaggaaatcacatccattatcatatgatgagctagcaacatcatataatcttgctccggcgtactaaataaaacagcctgcaataatggtccttccgccaaatccatctttactttcgttgtcttaattttttcctgaatctcttcaggttcacatgctatttttgtaaagccgtaccatttcttatcttctactttccctataacctgtttcttatctttgtacgtagctctcaacatatcatgatgctgcactaacgcagataaagctttttgtagtgccagatcatttagtttttcacgaaccttaaacacttggcatacattaaaatgttcaggatctatcatattttgtgcgaagaagtagttttgaattggtgtcagtgaaatttcaccagttatttctccttgctccgcaggcataatttctttttttgtggataaattcatggctattagctttggtgttctctccatcaaaagatttcgcatggagctatcgtatccagcttctcttatcttgtttagaatatggatagccttaatcgaatctccacccaaatcaaagaaattgtcatttacacttactctttccataccaagtacatgttcaaatgcctctactaccaatttttccgtctgggtctttggtgcctcataaccccttatcatcttagtttcttcaataaactgttccgggttcggcaataatttacgatctactttaccatttgcagatagtggaatctcatctacctgtatgaattgtgccgggatcatataatcaggcagatgtttggctaactctctttttatttctgccaattctacggtctcatctgcaacaatatacccacacaattgcttctctccatgtgaatcactgtaatcagcgacgacggactgctgaatatgtggcaaatgattgatacagtgttctatttctcctagttcgacacgatgtccacgtatcttaacttgactatcttttcttcccaggaagtctacatatccttccggacgcatgacaccataatcacctgttttgtacagataacctaatctatggttgataaaggcggccttcgtcttctcttcttcattgagataacctgcggcgactccttttccaccaatatgcagttctcctggtacacctactgggcattcttccccacattcatccagtacgtaaatttgttgatttttcagcggatagccgtaagggatacttttccactctggcttcacttctgtgattgggaaatatatggaccatatagagccttccgttgctccacctaacccgatgacttgtgcttttggcattcttgttttgattttcgctggcaaaccaagagaaatccagtctccacttagcatcaccatacgtaagcgctctgctgaagtgctatgcaccgtgtcttgctttgtgctttctagatacatatccataattgccggaaccgaattccatatcgtgatttcttcttcgatcatgatctgatgaatactggccatatctaaaagatctggaattaatactaactgagctccgctaatgagtgctccaaaaatatcatagacggataaatcaaagctcatcgatgatagggcaatgattttatcttcgctatttacttggaatttctcattaatatctaataatgtattcactactgcttcatgggtgatcacaacacccttaggatgtccagtgcttcctgacgtatagatagcataggctctatcctgctggcagccttctaacagttctaaggcgccatcgttataggtggaaaggttctctgtttcatataaatccggatgaatcatgagcttgatatcactatgttccacgatatattttattctttcctcaggatgttccggattaacaggaatataagcatggccggcttttaaaatagctaccatatttacaatggtctcaattcgtctctctgcccaaactccaatataagaattgagcgcatagttttgttctgctaaataacgagcgacctgattggattttctcgccaactcgccataggtcaatgtatcctgtcctaatttgactgcaatagcatctggcgtcttctggcattgctggtctattaatctttgcagtaaatccccttcatagtctccttgtgtacgattgtaatcaagcagaagttcagactgtgttacaggcagcggcatagatgaaagtttattgtctataacttgctgtaatcgaagttgatacgtttcaaacatggcactgatcatgtcttcatcaaacaaatcttttgcataatcccaagtcataattaattgtccgtctctttccgtgacttggaaatctaaaaatacttgaggggtctggcttattccgtatttaattttccctaatttcgtcaacgtatctgcaaattccgatttatcgaataacatactagtaaatacaattggcataatcgctttactagtcatttctctcttacttgcaatatttcgtataacatcaacaccactataaaaacgatggtctactgcttcaaataatatatcttgaaccatagatgctttctcccaaaaagcacgatgaacagataaatcaatatctaacaataaaactgatgtaaaatctccaatcaacttcattacgtctggatgaaaggactgtcgattaaataatgttaaattaagtgccattctggattgattgctccatttgcacaaaacttccgcataaattgtacataagaatacagatggtgttacaccgtactgagttgccaggcccttcacaatattccattgatcagttgtcagacttttctccattctctgaaatattggtttctctatgaattctggctcacaaactaatggtagctgaggtgcatagggaaaatcctctattttggcttgccaatagtcttgagctttttgataggcggaagattcacgaaagctctccaatgcccttacataatctgagaattggaatgttaaaggtttaatctccatattcggtttctcataataatccattatctcttgtattaaaattaataaactgcctccatcagcaattaataagtcaatatccaggaagagataatttttcttctcaccaagaataaatgcagtcaactcaaataatggccaatgatcttgttggaaaacaaaatgtgacctgctatttcttttttccaatatacgtttttgttgatcctctaaagacaagtcttgtaaatcttcaatacaaatctcataagaagaattagaacgccgaactttttgcattcctgtctcatcaaaaatagtacgcagcataagctgacgctctaaaacatgattcaatgcatcgtttaagcgtttaatatctaattctgtttcaaactcataataggcatgggtggagacattacccatttccataatattttgtcttccaactaaataggctccttgtatttctgttacctggaacggctcataccacatgtctttattccctgttaattcggatgcattgacatcctctgcctttagttgttcctcaaccatcttaattatttgttccagggtagacattttgaaaaggcttacaatagggatttcgacttgaaatcgttgatttatttcatcctggaaacgaatcaacgttaacgaactaactcccatccgagaaatcgtatcgtctactttcaaagaagggatagagaatacttcttttgcaatttcaacgatttgattttcaatctccgttttgttccatgctgacttctttgcagattccttgatactctgataagaatatggagctattgcgataacttcatcaaactcatgattctcaaatcgctctattaaaagaaaacgttgcacctttccacttgttgttttcggtatcgtttttattggaattacataatctgcagctattccaacccgttctaataccatatcctgcacttgatgggcaagtggcaaaaatgccttggcatcttttcgattatgtacaaatactataatttcatccctgatcgatgacggattgcgaacaccacacacaacgacttgagacaactctgggatcgccaatgttaacatattttctatatcgctagcataataattctgaccatttacaaacagaatatccttctttctgcccattacaatgagttctccattgcgtaaaagtcctaaatctcctgtacagaagaagccctgttcattaaaaggggaactatcatgattcatatatccctcaaatacatttttccccttgatcactatattgcctatgtaattttcccctaagatgtggtcttcatcatctacaatcaatatttctaattcatataatggttctcctactatggcaaactctgctgcatttggctccttcgtttctatatactccacttcttgaccaatacgagctttatgacggttaatacatacacttctattatgtccttcttcaggaatagtaacagccagactagcttctgccataccatagacttgatggatcgtattttcacgcaagccagaagacgagaatttttcataaaatcgtctaatggtatccattgatattggttctgcaccacacattatgtttcgcacactagataaatcaatattttctaaatgtgaatcctttacagtctttatcatccagtctaatccaaaattcggacttacaagcaccgttgcttttaattgcgcacatttttgaagatatagccaagatttctttaaaaatgtacccgaatttagaagggaatgagatatacccgcaaatatcggagttaaatgataaccgatcaagcccatatcatgtgtcaatggtaaccaactagccatgacatcatttgtgtctagtttcaaacgatctactatctgtgccaaattataaactagattttcatgtgttaattttactcctttagggttacctgtgctgccagacgaatattgtatatacgctaagtcctgacaatctactgtaacgcattgcccctcttccatattacatgctaaggtttcatactctaagtatttcaaattattggcttcataactttctctaaacgtatttaaatttctttcatcagtaattatccacgcattcggcaactgctcacttactttcactaacttcttgaaagcttcagtgtcaggcgatgcaattagcggtacagacagaggaacggggatcatgcctcctaaaatacaaccccaaaacaaccttataaaggataaattattgtttgtctgaaagataatataagagcccttctgaaatccctgcttttgtagtgcccctaagatggatttggcattaaaataaagactttcataagactcaaacaattcagagccatcggattgagtaaagtaaactccccttgatttctcgttagcataaattccaagtaattgatctagtgttatattaactccatcctctaatactgattttgtatagggtttcatattgcacctcttaaaaagttattgtttttatgatgcgatattatctttgttacaattgatgcaacgtcttgatcttgcctctttaatattaaaatttatgttgagaattatttatgtatattggcttctataattctattatattatatttaaggattatatcaacaaaattcttaaaatttttccagttcaaagggcgtggtttaaacccaccgcccttagccttcgggttggatagtaataatcagaatcacttaaaaaaacactcaataatgcccccgttgtcaagacacgattttttgaggaaaaagttatgtccttcttatcatgtcatgtagcatttcaggatgcgatctgttctcaatatatcatttttttacattttccaatttaatagcgtgcagaaaggcaaacagcctctgcacgcttgtgtataaatcttaaatttcaacttatatcttatatcatacagcagtcattttcttgatcatccagacggtgccacatcaaatgctcatcggtttcccttgatagtcaacgaaaacaaattcactatcgatacgaacttgtcgattaatgagattataaatatcttctgctgtttcttttggatgtgtcggggctatcattcctcctatatccgtccttacccaccctggatggacggaaaggacttgaatgccttcattctttgctacatggagcttctcggacaacatatttaaggcagctttcgacaatccataaggataatcaccactatatgcatttgttagactaccaccttctgacgagatgttgataatggattgattctcaccctttttcagcaaaggtagaaaatgtttaatcacacgggctggtcctaacgtgttgacatcaaatgctagtttgatagcctctatatcaagatcctcaatagacgtaccccttccattaagaatggcagcattattgataatcacatcaagactttcacctacattacgagctgcttcacgaacagattcctcgtctgtgacatctaaatgaagaatttataactggttgctatttttctcttttaatttggttaattgagtccttttttgttcattcgcatctctgactccagcaaaaactcggtaccctttttctaatccaacttcgacaaatccaagccctaagcccctatttgccccagtaattaatatatccaccataatcctcccagatttttttaatagttattttacggatgcatgtgatagcaataggtaagactttgatgtaatcgccatcttttcccctgctccacacccaacgtgcgattttcaccgcattgggcgttccatcttattcttttatgctaaagtaattctacaaatttaaggttccatatcgcatctatttgagtatcaaaggttttaatttcataatataaattataaaaaaaatgaacaaaactaatacaatcctattctacctttacatgatctaacaatttcagttcaaatccacagttacatttttttaatgtttttcttatcggagatatcttactgttacatcttgggcattcattaaccaaatacaaattatgtatgggacaaataacattaactgtatagttccaaattttcttctgataaaaattcccattaaaacaagctgggcaaattttatcagcatatgaattaatacctaacttaaagcccgtccttataaatccaagattagtggtatccataattttatcattaaaagtcatactccataattctctttcagtaataccagtaatgttgctcagtaactctaaacttatcttacccgcatcacctctaacaattttctttttttatctgagccatagtatatatccaactagaattttcataaccattataatcagttattcttaatatatatcctgctaaagattcatcttctaaaggttttggagttagcaataacctttccaataagccatacctctccttcatttatttttttattatttcaaaataaaacagctaagaaaatataattttcttagctgttttactttctagctgattttgaaatctagtttaggagttcttgaaactattccgaataattatgaaaaatcacattataatgctgtcatttcttcgtgctcgtgttcatcctgcacgaataaaatacctaattcatgatgttcgccttcataggacgcgcgctgatcaaaccggatctcaccgttcaggccgatgatctccatttttacaaatgcgcggtttttttgaagtgcttcataaaaatccgacacatgcttcacggggatgccgtttactttcgtaataatctcaccgatcttcagctcaagatcgtccgcgggtgtattcggaatgatgccgagcaccattaagccctgatcccgcttagagaaataaaacggagccgcgttatcgttcagccgctgtctcaatgataaaaacaggcgtccgagcaccgcaatacaagcggcagctccggcaagcggagtccaccaaagggcagctgccccgaatgcggtcacgatacccccgagaatcatgacacgtttcgccgttatccttatgctgacttccggaagtgacccctgcacacgctgtccgaagccggcgatataaggaatccagatcaaatggaaagagccgcccggcacggtaaagacaggccaccaagaaaggtgtgactcaagcccgctgcccggcaccaataagaaaagcggaagcagccatgcgcgattcgccaattgtcggccgatgggcaggcctctgctgctgacgacaagcgccggagatgttttcagatgcgctgaacggcaggcagccgctccctccgtgataatcaaaaggcccataaacacggccgccgatgcccaattcacgccgaatgcctgcggaaaccgatccgcaaacggcactgtgtgggtatactgaaggagaaacgcaatgaacatgccggcgctgacaatataagctgatgacagccaattcatacggaacgtcagcgaagccaaagccgtcacggccgcgattatgccgagaaaaccgaatggaatcgaaattcccagtccaaaaaataatatggagagaagaatacccggtataagtccttttatgtatgtaaagataagctcgtcatacatatccgcgatttttgtatgaaacgtatggcgttcacgtttgatccgcaaatatccgcatgcgagacttatgatgataaaaaaccagaacatcgggtgcaaaaaaaacagaccgatacttttcagaagttcaattccccattgaacagacactgctttcaccgcctcaagccaaacattttaattctattctaccaaataatcattggcttgaatatctcaaacgtttatctctcttccgtcatccacagcgttacatttgagagagagaaatctttcagatagtggtcaacctctacctcgatcacgccgctgatcagaagcatggaccgcttaatatccgtcagattgattcctaaacgtttatggtttttcattaagtaagtgaaataatgcttcgcacactcttcattgatttcgtgaacgcattcaacatttgtgtaattgaccaggtatctgctgaacagcataagaagacttagtgctttggttgatgaaaatgtgacgtcttttgttctgtcttttagttgttccactaattcataatattttttttcacgcacaatacttgccctcttcaattgtgaacccccatttttttatccagataagcacgggtgattacagctgccgtgctgaagcgccgcaaacacttctgctttcgatactgaaatgcagctgccaaactaaaactgttctctattagaaccttcttttattgtaagaactaaaactgactgaggcaactttcaaaagtttcattttgaatacatattaactcggcataaagtctctcttctctataaatatcgggtaatgtttgtcctttataaatgtttaaatgtgaaaatttttttaatatcttgtcaaaaccgacataattatatgccttttagttcatttttaaggcatgacaaaagaaacaggagacgaaaaaaacgcctccttttcatttattttacaaataatgattttaacgccatttgcagctgtaaatcatttttttcgtcagatttcttttcattcatcagctgattcattttttccactgtctttttatcaatgaccgctgttttatcaagcttgtaccggtcttgaaacgccagaacggcttttttcattgttttgctgaaatagccgtccgctctgcccgggtcgaagcctaggcctttcagcaggatttgggcgtgtttgacatccgcgctgttcatatcaggctgaagcggctgtttcagctgaagcggtcccgccgcaaaataatccggctggctcacggcgattgtcggagcaatgccttttttgtgaatccaattgcctttcggtgtcagccatttgtaaagcgtcaatttaatgttgctcccgtctcccataggcacggcctgctgaaccgttcctttaccgaaagaagtgtcgccgacaacgtcataatgtcccgcttcttttaacgcgcccgcaagaatttctgaagcggaggcgcttcctttatccgtgatgacattgacgggatacggcttcttatgttttaaggttgagaaatattgttttttatcgccgttacgctccgcaatttggatatacggcatgtcttttgtgatgaaatgctttaaaatttgttcgacgctttgaaggtagccgccgggattccctcttacatcaaggacgagaccgtcaatcccttgtttttcaagctttttcagcgccgcggcgaagtcctgggcggtatgctcggaaaatgtcgatattccgatgtagccgacatgatgaccgcctgattctttgcgggaagcaaatacggtttcaagcgggatttccgctcttttaatccggaatgacagctgtttatcagtacccggacgctgtattttaatagaaaccttcgatcctttttttcctctgattttcagcacggcttcgtttaaacctttcccgctcattgactcgccgtttatgctgatgatttcatcattcggcttgagtcccgctttttccgccggagattgcttaaacggtgatacgataatgattttattgtctttcataccgacttcagcgccgatcccttcgaaagaagaatcaagagaatcggaaaactgcttagctgtctgcttgtccatataaacggaataagggtcgtttaatgtagacagcatcccctgaatcgctccttcaagaagcttttcgttatctacattttccacgtattcgttcgagatcagctcatatgctttttcgattttttccattgcccggcttctttctgcgtctgatgaattcggctgtgccgccccggcaatatgggctccgccgcacatgatgctgacggccgctatcactgcgatcattttctgcttcatcgtttacctcctcttagtccttttacgaaaacctggagatagtatgtgtaaattgcaaagaattcatgtaacggcaacaaaaaaatgaaaacgcgagattgtttcatatatatgggtaacgtataatattttgtatgcaattcattaaatatacaggagaatgcgatatgaaaataaaattatcgattttatccgcggcggttctggccgcaggaattaccgcctttgtctggccaaaaacagaggccaatgaaaaaacgcagacggacgccttgtatgtttctccggcaggcagcgaccaaaatgaaggaacgaaagaaaagccgttccgcacattaaaacatgcggctgaaaaggcagaggccgggacaaccgtattgattcgggaagggacgtacgatgaaacgtttgaagtaaagcacagcggcacggccgaaaagccgattacatttcggaactatcagaatgagcatgtcgccatcagcggcaaatctgcgccaaaaagcgattctgaaactccgttaattcaaatccgcaataaacagtacattaccattcacggcgttacgcttgagaatctctccgtatcatcagaagatgcaacggccatgggaatcttcgtcaccggatcaagcagttatatcaacattgacggcaaccatatccgaaacattaaaaccacggctgatgagggaaatgcacacggcatcgcattttacggcacaggcgccatgaaggatgtcagcatcacaaataatacggttgaaaaactgacgctcggcgcaagcgaagcggtcgtgctgaacgggaatgttgacggatttaagattgccggcaataccatccgggacaataacaatatcgggattgacgtgatcggatacgaaggaacgtccaagcaaaacgactatgcgcgaaacggcgtcattgaaaacaatacggtgagccataactcttcttacggaaatcccgcttacggagatgaatattcagcgggcggtatttacgttgacggcgcagaacatgtggacattaagaagaacaccgtttacaacaatgaccttgggattgaagccacctctgagcatcaagggaaatacgcacgtgatatccggattacggataacaaggtgtacggcaatgcttacaccggtatttcaatcggaggctatgacacgaaacgcggcggcaccatcaattcggtgatcgctcataacattatgtatcgaaatgacacgaaggaccttgatggcggccagctgctgctgcagtacggcacaaaagggaacacgatcgaaaaaaacatcatgacggcaagccgttcaaggatttttattgcaaatgattatacgaaaaacgaaggcaataccgttaatcataacgtctatcacaaagaagcgggaaaagacggcatttggaattggaagaacaaagaatatgattcattcgcagcgtacaaaaaaggaacggcaaacgattcggattccatttatgcggacccgatgtaccgtgacgaatcgtcttatgactttacattaaagcccggatcaccggccctgcccgtcattcagtaacgaaaccattaaaaaaagccagtctatatcagactggcttttgtatttatacacgaaggaatttccggatggaagtcagacttccccatactccgataaccgcgccgatcagaatgagcacaagtgatacttggaacacaaacgggctgtacggcagaagtgaaacaaatgagccctgaactttcggggccacccaagcgaccatcgactggtacgtactcagcacgagagcgatcggtatgatagaaccgaatacccccagcagcagcccttccaggaagaacggccagcggataaaccagtttgtcgcgccgacaagcttcatgatttcaatctcttttcttctggcgaaaatcgtgattttaatcgtatttgaaattaagaacatcgccgtgaacagaaggccgatgattaacgcaatcccgatgttgcgtgacaccccgacgatcttaaacagacggctgacttcttctttcccgtatgtcactttatacacatgatccagcttctcaatttttttcgcgactttcggcgtatcatgcggatctgtcgttttgacgataaacgcgttgttcagcgggttttcctgatcttgcattttcatggcctttccgctgtcgccgaagcttttgaccaattgatcaagctctttatctttagatgaaaactctacgctttggattcccgagatgtctttaatctcattctgcagcgtatcctgcgttttcttattggacgtcagatcgattaatactttaatttccacttctttttcagcatttttagccatgttgtttaaattcagcataatgactaaaaacacgccgaccaaaatcaatgtaacggtaacggcactgatggatgcaaatgtcatccatgtgtttcttccgagagatttaaaactctcacgcaaatggcgcccgagaattttaatcataagaaccatactcccctcttgactcatcacgcacaataattccgtcttcgatcgcgatgacccgtttcttcatggtgtttactatttctttattgtgtgtcgccatcacaacggtcgttccgcggttattaatctcttccagcgtcttcatgacttcccatgatgttaccggatcaaggttgcccgtcggttcgtcagctatcacgacgtcaggattgttgacgatggatcttgcgatggaaacacgctgctgttctcctccggaaagctggtcgggaaactgccgcgctttatgcttcagctgcacaagatcgagcacttcgagcacgcgttttttaatgactgactgctgctctccgatcacctcaagtgcaaacgcgacgttttcaaacacggtcaatttcggaagaagtttgaaatcttggaaaacaacacctattttacgccgcacgaaaggaatctctttttctttcacagacgcgagatctttatgattaatcaatatttgcccttttgtcggcttttcttctctgtaaatcattttaataaaagtagatttaccggctccgctcggtcccacgacatatacaaattctccgggatgaatcatgactgacagcccgttaatcgcttttacaccgttcggataggatttatatacttctttcatctctatcatgaaatcacctaatcttttaattatgtcttgcagccatagagttcgtaaaaatactgcggtttatggccggtttaccaggaaacagatgaaaaatctgaaagttccttttcctcagtacacttcattatacgtcaaatttagacatattactattacagtttcttttcattcccagaccgtgaaaaaaccttgcccctataacaggcaaggtttttctgttattttttctgtgacagccattttgcgatcttcgcggcttcctcatcatttacaagatggctcggcatattgccgcgtccgtttttaatgatgctttcaattttagcttcatcatacttcccgccgacttcctgtaaattcgggcctccgccgccttctaagtcttttccgtgacagccgatacagctttgctgataaagctcttctcctgctgacgcagaagcttttgatccgcctgagctgtcagagctttcttttttcgattcattggatccgccgcatgccgccagcaggacggacatggtcagaaccagcgccagcagcgcccattttgatttcatatgtaagatgcaccccttcgctattataaccccgtttacgcgcgtttgaaaccctcgccgagcacctcgcttgcgtctgcgacaatgacaaaggctgactcatcaatttgtttgacgatttgtttcagttttgtgaattcggtctggccgacgacacacattaagatcggccggtcatgttccgtatacccgccgactgcggaaatcttcgtcacacccctgtcgatttctttaaacacagccgatctgacggcttcttcatgctgcgtaatgattaaagccattttggagcggttgaacccgacctgcacgacatcaatcgttttgcttgaaataaataccccgagcatcgcatacagtccctgctccactccgaaaacgagcatcgcgctcagcacaattaatccgtccatgatggcgaggcacgttcccagcgaaagccccgtgtatttgtgaatgatctggcccgccagagccgttccccccgtggagcctttgccgagatacacgatgccgattcccgttccgatcccgacgcctccgaaaatcgccgccagcagttcatgggtcgtcgcggcaggcagatctcttgttaaatagacggcgagcggcagaacgatggaaccggccagtgtcttcattccgaacttcccgccgagaatgatcactccggcgataaacaaagggatgttaataatccactgcacgtaagccggttcaaaaccaaacgtttctaaaatggtgctgatcccgcttactccccccgctgctatacggttcggcagcaaaaatacgttaaacacgacccccgtaatcgccgcgccgatcatgatatatatataatctttgatcagacggagcggcttattatgattcacatccatgcaaaatcctccgttctccgattttctctcgatagcattttaagtcttcccggcttagaagtaaataacagccaaataccgtattaatttgctaaagcgctgttgtgaaaaatggaaaaagagaacggataaaaaaacacaccttgccaaaggcaggtgtgttcccggattacgacagtttagaacgtaaataggcgtcaatgaagatatcgatatctccgtccataaccgcctggacgttccccatttccgtattggtgcggtgatctttcaccatggagtacggatggaagacgtacgagcggatttggctgccccagccgatttctttctgttcgccgcggatttcgtcaagctccgcctgctgttcttcaattctgcgctgatacagcttcgctttgagcattttcatcgcccggtcgcggtttttgatttgtgaacgttccgtctggcacgtgacgactacatttgtcggcaggtgggtgatccgaacggctgaatcagtcgtattgacgtgctgtccgccggcaccgctcgcccggtacgtatcaactttaatatcttcggtacgaatatcaatgtcgatttcttcattgaattcaggcatgacttcacatgacacgaatgacgtgtggcggcggcctgatgaatcaaatggagaaatccgcacgaggcggtgtacgcctttttccgcttttaaatagccgtatgcattgtggcctttaatgagcagtgtgacagacttaatacctgcttcatctcccgggagataatcaagcgtttcaactttgaaaccgcgtctttccgcccagcgggtatacattctgagcagcatggaaccccagtcctgggattccgtaccgccggctcccggatgaagttctaaaatcgcgttatttttgtcatatggttcactgagcagcagctgaagctcaaattcattcaattccttcgttaatgacttcagctctttttcaagctcttgctgaaggtcctggtcaggttcttcttttaaaagatcatgtgtcatttgcagctcttcgtgagactcgctcagctgatgataggagttcacgtattctttcagaccgttcgcttcattgatgacggtttgggccttctgctggtcattccagaattccggttccgccatcttttcatctaattctgcaatgcgggcttcctttgattcgaggtcaaagagaccccctgaagtccgctaaacgagaagccatattttcgagctctgccctgatttctgataattccattccattcacctcattaaaagatccggggcgccataagacgcagacccggtcatgttcgcttcatacagtcgagactattctgtccggccgcagcaatttttatatttttttccgcttccgcaatggcaaggcgcgttacgtccgatatccacaactttgcggaccggcgcttttttcgcttgtttggcctcatcgccgtcctgcggctgatgagccgtcgtttggccctgaacaacttcttcgcgttccagattgctttcaatctcggccttcatgacgaatttcgcaacttcgtcctcaatggactcaatcatgtgctcaaacattgcgaagccttccatttgatattcacgcagcggatttgtctgcgcataagcgcggaggtgaatcccttgacgcagctgatccatcgcatcaatatgatccatccattttgaatcaacggcacgcaatacgatgactttttcaaattcacgcatctgctctgtgccgaaattctcttctttttcattatattttgtcatgatgcggtccatgatcatctcatgcattttatccggttcttttccgaagatatcgctcttttcaagtgcgccttcatcaagatacgttgaattcaccagctccacgaggccgtcaagattccattcttccggaagctcctctttcggcgtataagcggcaatcgcacgctccagagaagacttgatcatgccttccacaatgtcacgcaggttttcagagtcaatgacttcaaaacgctgcttgtatatgacttcgcgctgctgacggagcacgtcgtcatattgaagaagctgtttacgtgaatcaaagttgtttccttcgacacgtttttgagatgattccacggcgcgtgacaccattttgctctgaatcggcgtggagtcatccataccgaaccggtcaagcatcgccatcgtccgttcagctccgaaacggcgcatcaattcatcttccattgaaagataaaattgtgtgatgcccgggtctccctgacgtcctgaacgtccgcggagctgattgtcaatccggcgggattcgtggcgttccgtaccgacgactgcaaggccgccaagctcttttacgccttcgccgagtttaatgtcggttccgcgtcccgccatgttggtcgcaatcgtgacagcgcctttttgtcccgcttcctcaataatctgagcttcacgctcatggtttttggcattgagcacctgatgcggaatccctttgtttttcagaagtttagaaatcaattcagacgtttcaacggcaaccgtaccgacaagaaccggctgtccggtcatgtagcgctgggcgacatcctccgccaccgccttgaatttcccttccattgagcggtagatcaagtccggacggtcgtcacggatgaccggctggttggtcgggatggatacaacctgcatgttataaatattgcggaattcttcctcttccgtttttgcggtaccggtcataccggcaagcttttcgtacatacggaaatagttttggaacgtaatcgtcgccaatgtcatgctttcattttgaatctccaggccttctttcgcctcaatcgcctggtgaagaccttcgctgtagcggcgtcctttcatcagacggccggtgaaggaatcaacgatgacgacctggccgtcctcaacaacataatccacgtctttctgcatcgccgcatgggcttttaaagcctggttgatatggtggttcaaggccacgtttttgacatcaaacaggttgtcgatgccgaacgttttttcagccttcgtcattccttcttccgtcagctgaacgcccttcgttttgacgtcatacgtataatcctgatcttttttgagcgtgcggacaaacgcatttgcctgcacgtacagttttgtggacttctgagcttgtccggaaataatcaatggcgttctcgcttcatcgactaaaattgaatcgacttcatcaataacggcaaaatgaagcgggcgctgtaccatttgttctttatagagcaccatgttgtcacgcaaataatcaaagccgagttcattgttcgttgaatacgtgatatcggctgcgtaagcttctcgtttttcgtcttttgacatcgaattcaggttcaggccgactgtaagcccgagaaacgcaaaaatttctcccatttgctgggcatcacggctcgccagatattcgttgaccgttacgacgtgaacgccttttcccgtcaacgcatttaaatacacgggaagcgtggacgtcagcgttttcccttcccctgttttcatttcggaaatgttcccctcatgaagggcgatgccccccatcagctgcactttaaacgggaacatgccggttacgcggcgggaagcttcacgaacgacggcaaacgcttcgacaagaagggcatccgtcgtttctcctttttcaagccgctctttaaattctgccgttttatgtttaagcgcctcgtcagagagattttcataatctcctcttacggcatcaatgtcatttgctattttttcatatttgttcagcgcacgtttggtcggatcaaacattttatttaaaatcccaagcatctataacgctcctctatgttcacatgcagattttgcatggaataaatgataattttctgtccatgtatacctctcattatcataccataccttttgccatttccaaagaatttgcagataaagatagagaaaaaccttccgcgcgttcacggaaggctggatggtttattcagtcggttcaattaatccgtatttgccgtcatttctgcggtaaacgacatttgtgagattcgtctccgcgttggtgaatacgaagaaattatgtccgagcatattcatttggagaatcgcttcttcattatccatcggttttaaattaaaacgcttttgacggacaatttccgggctgtcatcttcaatttcgtcctgaaccgctacgcccgtatcagcagcgctgccgttctcgaaataatgtttcggaagaccctgctcgcggaattttcggttgacttttgttttgtgctttcggatttgacgttccagcttgtttgttgcgagatcaattgcattgtacatatcctcgttatgcacttcagaacgaagcgccagatcagtcatcggaatggtgacttcaactttggattccttatcattatagaattttaagttgacgttcacatcggcattgacgctctgctcgaaatatcgctccagcttgccgatttttctctccacatgatcctttaacgcaggtgtaacctcaatgttttctcctctgatattgtagttcatcaaagaacgcctccctttatctaaggatatgtaactatttctcttttaccccttctgatccctgctgaaacgttaaaataatgtgtaaattcggtgaacgatgacgaatggtgtcggttttatccggcagcttccgccaggattataagtatatgcggaggacgcaggcaaaagacctgccgcttgcagcaggtctagtgaagaacatacggtttgatgcagtcgtgcgtctgctccatccatagcttataatgcggcagaaagatggtttttaaaaactcctgaaaaggggcggacgggaaatcataatcatttaacatgctgaaatcctgaaagatctcgtcaaatgagcggatcgccgtctccacgcatcggcactcaatgatagacagcagaagcgcatgagaggaatcgagatgaaaaaaagcctgaatcaaatcgttgtaaatccgctcgccctccgtcttaaaaaaatcatcctgcgtgtccaacaggtagcaaagcccctcatcaatcgtaaaaagaagctggtaataggctgacaccaaatggtaatcgttcaaacttctcaaaacactcacctatttgcgtttgtcgtaataacggccgtcacttgtcgtttgatgatacggattgaaatacgtattatggtagattcgttttttcttaagcgtttttatttcatttcggataccatcctgaatccgtttcacttcgccggtaatcagacggtccatcgcggccacctgctgaagcagcgttttttcttcttcggaaaaaggcggctttatgcccgcaagcatctcctcccttttctccgtaaatgccgtaacgctgctgatgagaccatcgctctccggggcgtccttcagtgcggcgtacatgttcttcgtttcgttatacaaagaaaagacattgctgttcatcaggcaaggccgcccgcgccatggctgtttttccgttcactctgcatggcctgcttccacgtgtcgcgaaattcagtaacgagcttttccgcttcatctaaaaattctccgttattctgcacgttcgcgtcgatcagccggcggcggatgtaatcataaatggatgacatctgttcagaaatctcaatctcccggtttaacgtgatgctgagctcttgaatgatgttttgcgcctttacgatattttcatttttggcttcaaggttgttttgcttcatcgcctgccttgccagcttaatgaatcgcaggcagccgttataaagcataagagtcagctcttccggagcggctgtaaagacggatgtctgctgataagcagcaaaaggattatttattgccatttttataaaacctccaaggttatgatgttgaagatcctaacattgacgtgagatatgaagattggctgttcaatttctccaatgccgtatccagtgcgctgaactttttataatatctcgtctcgatgtcatccagcttcgttttcatattggaaatatttgtttctatttcatccaggctttttccgatggtaaagctggttgataccgagctttccgtacccgcctgttttgaaatttgaatctgcattttgtttaatgtgtcttttaatctccgggcaatcccctgttcctccgggtttttggttttcgctgtatcagggctgtctgcattaaacagtttagccacgagagcaggattctcggtaattttctgtttcagtttcgcttcgtctttaatgacaagctttccttgatccgtataactatcagacgtctcaattccgaaatctgcaagctgatattttttcccgtcaatcgtaaccgttgagtacagatcaagccgcatctccgccaacccgttctgcagcgtgctgtcgctccgtaataaaccgcttttggcctttgcttcccactgctcaatctgcttatcggtcatcgcttctctttgttcatcggttagcggcttataatcgcggtattttgattctgtcaccttcgcgtttgcgcttttaattaacgtattgtatttatcaacgaaatctttaatgttgtcaaaaatcccgtccgtatcagtcgtgctgttaatcgtaaccgttttattgctgtccgtcacgctgttcagcgtgtatttgatgccgttgatcgtaaagttattggacgtttttgtcatttcaagcccgttgaacgtaaatttcgcgtttttcccttcggcattggccgtcagttcatttgtcgcatcatcaacggcaaaaccgagctgatcttttagaaagcttttggtcgcgtcatcacctgctgaaagggtaaatccttcccccgttttattggaagtgaacgcaatcgtgtccacataatccgtgccgttggaaattttctcttttaaagccgtcaccccaaggcctgagctgttcagtttagaaatgacatcgtcaatcgtatcggttgcggcgatcgtgacgtttacctcagtcggcttcgtttcacccggatttgtgacattgaatttcaatgtttggctctgacctgaagtgaaattgatggcccctgatgatttataagtcgtcggtgtggccagctgctgtacagacatgctcgttgaaatattctgttcagcactgacagccaccgcgctgacactggaatccgaacttgttactgtttttttattccagtttgtggacatcagcatattattaaatgtagtagaatacatgtcggcaatctgggtattcacttcccgataagcatcgcgcttccattcaagcgtctgcttttgctggtttaatttattaagcggctgcttttcggcatccatcagtttttttaccagagaatctacatcaagaccggaattaaggcctgtgattcttgtgaccatatgtaccctctccttttcggcgtttagtcgtatacggctctatgacaacagtgagtttccgactgtttatcatatcacagctccataaatgtatgatcttattcttatatcggtcatattaaaaggttttcaataattcaactgcaaaatataatgtttcattttgtcaatagggttctttggcatgatgaaggggaaaatagatgaagaaataaaaaaagaccctggagaaccaggatctttccgtcattaacctttaagcaattgaagaacttgctgaggctgttggttagcttgcgcaagcatagcttgagaagcctgagtaaggatgttgtttttcgtgtactccatcatctcagaagccatgtctacgtcacggatacgtgattcagcagaagtcaggttctcagaagaagtaccaaggttgttgattgtgtgctctaaacggttttgaaccgcaccaagtttagcgcgctcgctagatactgtgtcgatagctgttttgattgttgtaagagctgaagacgcagctttagctgaagatgagatgtcgataccttttgttacttttgtatctttagctaatgcactgtcagcttgataaactaatttatcagcatcgtcatagtagccattcggccctttagaaccgtcagtgacaagggttgcttcttttccatctgcagttacaagcttagaaccgtcatcatttgctgtgtaagtcgtaccgactttcaggctttcagagtccattttattgatagacaggctcattgtttggccttcgttagctccgatttggaacgtaaggttttgcgcagttccgtcaagaagtttcttcgtgttgaactcagtgtcagtagagattcttgttacttcagacgctaattggtccatctctttttgaagctcagaacggtctgaatctgtgtttgtatcgttcgccgcttgtgtagcaagctcgctcatacgctgaagaatgctgtgagtttcgttcaatgcaccctcagatgtttgaataagagagattccgtcttgagcgtttttagacgccatgtctaaaccgcggatttgagaacgcattttttcagagatcgcaagacccgcagcgtcatcaccagcgcggttgatgcgaagacctgaagataatttttccatgtttttagaagcagcgtttgaacctgcattcagctgacggctagtgttaagagccgcgatattgtggttgattctcattttgtatttcctccctgaattgtttttcgcacgtccttgtgcatttgcgcagcgtcattctgaagaaaatttttcctctcattggctacactatatatatcggacggccgcttccattgtttatattgaaaataaaaaaatcctcactttttttgtgaggataagttaagtaataaatcagtattaaaagatacagctctgttgttctcttccaggatcgacaagtagatttctttcctgtgaatatctacgtgctgaggcgcttcaattcccagcttcacttgttctccttcgatggcgatcacctttatttcaatatccggcccgatctgaatggactcattcacttttcttgagagaactagcatgatcctcctcctatcagatgttttgtttcataggaagcatcatgtaaaatgatttgtttcgccttcatttcctttttattgacgataatcggcgcttttaaattggcggtcgtgttttcaaaaggctcttccagcgttaaaatcgccatcacttcgacgtcctctatatcttcaatatgcaaaagttcaagcgtcgcatggtcaatgtcaaattcgtaccctttaaagaaaataaacggactggcgacaataaaggcgatgtgctcctgtttcacagactgcagcgccaaaaacggtgaatcttccgacaaaggaagaacaacaaattgagtctcgtcattaaatcccggcaggccgttttcaaatgagataatctgcccttcgtctattctgatttctccgtgatattttgttttaattatcatgcttcacaatcctttaccactttcatcttttatcctgcgttgccatcgtcaaccgaaatcgtcaccttaggatcttgcatcatatcaatctgaactttccccggcgtataattccatacaggtttattgacggctgcttcaattgaaggtttgcgggcttcaatatcaatcgtaagctttgaaggaatgcagtcaatgtcgacgagaaactgcgcaggcagaaagtcgctgaattcgccgaatggatcgggcggtctgacatctgctgcctgccgggccatcacattgcccgttttcttttcgatagccgccatttccttcccttccctgactgtttttgcgataaactcgctgcaggcttccgcacctttttgagcggcttcagcgttcagcttttcaaatgatttgagattcaagttctcccacgccctcgtctggtcaatcgtcagtttggccggcgtgctttcaatgttcagctctgccggcggctgctcaatttccaggtcagcgggcggctgttccatctcgatttcttccttttgaaaggttatatcgattttagcaggcacactgtcaataatcaatctcggcatctgcacagagacccctcctgtttatagtattttagtaaaaaaagcgatctccctggtgtgagtcgcttttttatatattgaagacggtcagttatattatttcagaaagtcaatcagtgacggctgaatgatattcgcattcactgacagcgctgctctatgaaccgtctgttgagataaataatcaacaattacatcttccatttctacatcttcattatcggacaatactttttcagcggttgccgcttgtgattccaatcttgtctgaatgagttccaaccggtttgtgcgtgcgccgatattggatttttcagcattcattttatcagtaaaaccgtcaatatctgacagaatttgatctgaatctgcttcggacagcgtgcctttgcttaaagaagcttctaaggagttaagaaattcaaaaacattatctccattttgtgcgacgcctccgaaagctgagtttggatcagaattcactttcagcactgctccgttcgagatgttgatgttaacatccgaagcaccggtataattctcatagttgtacgtatatgtgccgtcggcattttcagtgatcggcgggacgtctgaatttgttccgttaaacagataacgtccgtttacctgagtattcgcgacagaaacgagctgctttttcagctggccgatttctgtaccgattgctttcaattctgtttcaccgttcgaatcacttttcgcctgaaccatcaagtcccggattttccccataatatccgtttccgagtttacgcttgattccgagttttccagccatgtaaaaccttgcgaaacattccgctgatactggtttacctgcgcaagctgagtacggtactgcattcccttcattgcaacgaccggatcatcagaagctttcgtgatttttttccccgtagacacttgctgctgaagccgatcgagcttgtcataacttgagccgataaatcgaagagaattttttgcgatcatcccttgagttactctcatttacttatctcctatcttcctccggtgcccataccgttaataattttatcgaatatttcatcttgcatcgttataatccgcgcagccgcattataagcgtgctgaaactgaatcatatttgtcatttcttcatctaaagacactgcactgactgattgtctccgttcatcggctgaaagggtgttgctttcagagttgttcataagattggccgctttttgtgaattaacgcccagctttccgataagggattcataaaagtcattaattgtagtggtttcaccgttaatagtcagtttgctgttctgtacggctgcaagatttgtcgcgtttgtgccgtcacttttttctccgtttaacgacgctgcgatattatcagtagacgcaaggattttgtcactgacttttattttcgctgccgcaccttttgccggcaccgcctcaccaccgccgaaatcaaaaaatgctgcgccctgttcgcctgtataggtcttccctttttcatgaactgcattaaacgcgtcagcaaaggacagcgccatattgtcaagagccgtcagcatttcaggataaagacctttttcttctccgtttgacatatagccgtatgattcaataagacctaaaagtgagccttttccggtaaatgcatccgcattgaccgtactgctgccgactgacacactcgacacgaggccgctgtccttgtcgtagttgattttcatttctgaaactgtttttgtgttaccgtcgagcagcgtaccgagagaattgttgtttccgttcagcaattcgacgttaaccgtgccctcagcagtcgccaaggtatgtccgcccgacttattatatgaaacttttatatttgccatagaagataattgatcaatcaatctgtctctttggtcatacaaatcattagggagcataccgctcggctcaactgccgctatttgattgttaaggtcattcagctgattgagaatggaattgacctgatccgctgtgttatccaggttctttttaatatcaccctgaatgttagtcaaagaggtagatatatagttaaaactttcggcaagagatttcccctgctcctgcaaaactgagcgcgctcccgtattttccggattcgtcgccagatcctgaagggcattccaaaacgaactgagcgatccgtttaatccgttatcgtcaagctctttcatgacgccctccatttgcgacaatgaattggaacgggctgtatagtaccctaattttgtattttcagttctgtactgatagtctaaaaaactgtctctgacgcgctcaactgaaccggcttttactcctgttccgatttggccggccgtcagatcactgttttttgatactgcgggataagggctcgtcgattgtaatgtgacgcgctgcctcgtgtacccttctgtatttgcatttgcaacgttatttgaaactgtgctcaatgcagtctgctgcgcactcaatgcacgccttgctgtttccagccccataaaagtcgatggcattgaaaatcctccgttctaagcttttgaatcgaataatgtcaaacggctgacaggcttgcgcgccgcttgcggctctttataattcatattctctttttcacccggcatgatcatatcgaatgccccggagatgaattgtaaagcctgaatcgtgagctgtttgttcatctcattcacttctttcagacggtcaagaagcgcagacaaagagtgaaataacccttcaagctcctgtttttcactgcctgaagttctggagatgcatgcagcaattgtattgtcctcaccgcggctgagaaactgagaagttaacctgattcgttcttcctcagtctgcccgattgcctgaatatacttttgctctttggtcaatatgttggagagctcttttgttttacctgctttcagcgcttccgttttctcctcagacagcgtgagcagatgttcatgcagtgcgcaaagtcgcttcagttgatcaataattggctttgctgacattggctttctcctttttattgctttttatagaaatttactatattttcagcgatgctgtttgaatctattttatatgttccgctctctatatccgctttaagctgagcgattttttcctgtcgtgttttagtgaccgcatctgacgcattttgaagctcttttgcatgagaagaaatttccactttgtccttcggctttgcagcctctttttgtacggcttgcttttcgtaatttttttggtatggattaacggattgtgttccgtactgattgattttcataggattcctctcgctttctgttcgcagtctaattcttttatcgactgcgttatcagttagtttagggaatcaggtgtttttggtattataggcatagtatgtgtcttttgtactgtttttatcttcgaattcagcggctgttttttggttcatatggtctaattgcgactcaatatctgtctgacaggacttgcaaaatttccccgtcctgattggatttccgcacctttcgcaaggatatgccaaattcggaagctggctgatctgaatccttttttgtttgataaacttgaggatcagctcttcatccacacctgtttcctcagtgatctgctgcatcgtcgactgtctgttgatctgctttctcaaaaatttatagacggtttcaaatgctttttcttcttctttaatacatgcctggcacacggtctgcaggttcgttttaaaaaataaagcattgcattttggacaattcgccaattcacccatcgtattaactcctattccttctttaatctgccttatatttctatcaattatatcggcagaaaaaaagaatgatttagctcctgattaaagtaaaagaggagaccgatgacgctttgcccgctgtcagcaggacttcggcggcttggtgaagtgtggcgcccgtcgtataaatatcatctattaaaatgacgttcataccttcggcggagttttcggctgctgaaaactttttttctgcagacagcctgtctgttttgctctttttggattgtttttcgttgttcagtcggatgaggggggaaatgacgggcattccgagcagagaggccagcagctcggattgattgaatccgcgttccgccagccgttcgccgctcagcggaatagggatgagagtatgtgtatttgatggatatgccgctttaaagccggcagcaaagtcacgttcaaatgcttgaatgattttcgcatcacccctgaatttaaaacgggccaatgagtccttcatcgcatcattatataaatataccgaacggttttgccgcagcaaaaagcgcttttccgtttttgattcccgggccgcacaatcagcgcatttttcatttgactcctgaggcctcccgcatatactgcatacggggccttcaattttttcgaattggctgctgcatatgctgcatatctcttgctcgggcgccagagaaaacagagatctccaagtcaatgaacttgaaattggtgagtcacacaataaacaattcagagatattacgctccttcccgagtttcacagaactcgcttggattaaccgaaacaatcgccgctgattcagccagaatgacaagcagcgctgtatttttctgtttatcaactatctctgcttttgcataagcaactttctttttatctgtaacatatgccggttcagcccggttaagtgaaagtgccagtacatcatttttgcatacccggcatgtgcatttcatatgaagcttaggcatatggcggtcgagaagttcctttaatatgatttctttagaattgacaagcatgctgacagctcctcataggaaagtatgagtatactgtatcacgttttctgaaattaactagtccaacaatttacttttttgtgccaatttgttcatatgttctatatgtttttttgcttttttcattccgtttgtaattccgaaatgaaacatgacgacatcaccgctgaaatgtttataatgccttcccgttctgcccgcgatctgtacgagcgcgctctcggtaaagataggtgcttctgcgccgaggacacatgtctgaactttgggcacggtaacccctctttctaaaatcgtagtcgttaccagcaggtcaagcccgccgtctctgaaccgtttcactttatcctttctgaatgtgtcttccgcatgtacgccttctgcccgtatgtttaatttctgaaaataatccgttgtctttttcaatacgtgtacagacggaacgaataagaaaaccggcagctgtgattgaagtttttggcggacccaatcggttacagagcgcggcagttttcctttctgaagcttcttcttccaatttccgcaccacaaaaaacgcggctccgggaggggtttccgatgatatctggccggtatgcggacgcttttcagcaaaccggcttcagccttcttttttaatgtgtctgaaggagttgccgttacataaacaagggcgctgtttttcttcctcgctttatcaacagcgaatcttaatgtctcatcggctgaaaaaggaaacgcatctacttcatctattatcatgacatcaaaaatgtctcggtagcgcatcagctggtgagcggttgaaatcattaacggggtcagacggcctttgtcctcgctgccgccgtacaaagcagaaacttcgactttctcaaatgcttttttcagtctcggcagcagttcaagtacgacatctgtacgcggagtcgcgacacagacgcgcaaaccgtgattcagcgcaaactcgatacccggaaacagcatctctgttttccccgatccgcaaaccgcccatactaacagctcttgtctctcttttatcgcatctgtaagcgcggcggccgcccgcttctgtccgtctgtcagtgttccttcccaagaaagctttacaggctcccagctgttttcatgggcttgattccaagaatataatgatgtcagttcatcagcccttcccatcacgacacaggcacggcaataggtaatctgccttttggcagagggcgcccaaaatgccgcaaagcaggcttgatcagactgaccgcatcgttggcagacgtaacgatttttccggcggatgattgacggctcggccgttatatattctttttctgtaaaacgcttaatacgctggtctgaaaacggtatctcagatctcaataaatgccggccgtaaaagaaatcccgcacctctgaaaattctgaagcaccttcggacatctccctgcctcctttctgctcaaagtatgtcttgtcgggaacccacttgtcgaattgcgaaaattaaaaaataaaaaaatctccgcccttgaaaacggagattttcacttagtttttaaagcaccagccgattccgatggcgccttcgcccaaatgggttccgatcacggcgccgaaatagctgttatagaattcgacatgaggatatttaccgcttaactcctgtataatagccgccgcttcttcttccctgtttgcatggatgacagcggcccgcatcgggattcctttacttgcatcctccccaaacagctcaaaaattctcgaaatcgcttttttgcgtgtccgaatcttctcaaaaggaacaattaccttattgtcaaaatgaagaataggctttacctttaacagaccgccgataaaagcctgagcactgcttagacgcccgccccgctggaggtgtgataaatcgtccaccataaaatacgcacggactgtttttttcatttcttccagctcttttataatctcttccggtgagtcaacaccgtctttaatgagctgtgctgcctttaacgcataaaacccttgtgccaaacagctgatctctgaatcaaagggataaactttaatatgatcaaccatagtgtttgccgaggcggcgctgttatatgttccgctgattccgctggacaaatgtatgcttatgactgcgtcatatgttttgcccagttcttcgtacaatgcgattaattcaccgaaagaaggctgagacgtagtcggcagctcatcatgattttttacttctttataaaaacttctccagtcgagttctgtttcttcgcggaatgttttttcaccgaaaaccacttggagagggatcatatgaatatgatgttcttctctcatctctttcggaatatatgctgtactgtctgttacaactgcaatcttcatcactttacctgccttattaagtacttaataagtattttaatagatatgcagctgtaaaaaaagacttgccataacaggcaagtcttctcacacatgactaacgcatctctacccagccgtttttaatggccacgacaacggcttgtgtccggtcattaacgttcattttctgcaaaatattactcacgtggtttttcactgttttctcactgataaacaatgattcaccgattccgcggttgctttttccgtctgcaagcatttgcagcacttcacattcccgtctcgttaatatatgtaatggtctccggatttccgggtaaacctcatgctgaggatgagcagaaactccgcttgtcgcaagacggcggaattcgttgacaagattgtgggttactttcgggtgaaggtaagaaccgccctcggctaccactttcactgcttcgattaaagtatctgcgtccatctctttcaggagatagcctcttgcaccagtttttaaagcatgagtcacatagttttcatcatcatggatggagaggataatcaccttagattcagggtacagctcaacaagctgtttagtagcctctactccatttacattcggcatattgatgtccattatgacaacatcgggatgataatgctcgacgattcgagccgcctcatctccatcgtcaccttctgctaccacttcaaaggtaggttcaaaatccaatattctttttacaccctcacggaatagttgatggtcgtcgataataacaatatttactttagtcacacgctacgcctccttatcctattgttctatatacgccgctgttcggtcaatatgtcttttggctctatttaacaaattataggccgagagataacggaaccttaatcatgataaatgtcccaagacctattttagagtctatcgttatcgttccttcaagcagatctactctttctttcattcccagcaagccgaatgacttgtttttcttttgtttagcatccttaatatcaaagccttttccgttgtccttaatgatgagaacgacaaaatcagcggttacttccacttttactgtaatttcctctgattctgaatgcttgagtgcatttgtgacggcttcctgagcgagacggaaaagcgccacttcaaattgcggggcaagcctttggttctctgtgtctccgatacactgaaaatgtattttcacctttccgttgtattcttcagttgtataaagatattttctcagtgtcggaatcagcccgagatcgtccaatgccatcggtcttaaatcatatataatccttctgacttcgtaaagggcattccgcacattctgccgcagatttctgatttcctgaaatccgtcctccgtgccgcggtcgcggaagatccgttcaattaattccgatctcatcatgacatttgccagcatttgcgcgggaccgtcatgaatttctctggaaactctttttctttcttcctcttgggcttcaatgattcttaaaccgaaatcttgtttagcctgcgcatcggcaagaagaagccctacttggcgaaggtcttgattcaggtaattcagaacgacggttatttggctgaccaatgattctgaccgttcaatgatttcctgaagccccaaaagccggcgttctaaatcatctctgcgctcccgcagctgcttttcacgctgttggatcatcgtcagttccacttgaagtttgtgcgccttttcataggcgttgcgaatttcttcttcgctgaacttatggaaatttctgcttacttcagacaagcggtttcgtgcgtgccgcgtatgaacttcaagtttgtcgcccagctcaatgacttcgtagacctgctgtttgatctgtttgagttcttcaaccagctgctcatattgctggcgcgactgctctccgatttgaaaaacctcgtccttactcccgtccacggttttcagcattttcataagtatagaatccaaaactttggagtccatcttcgatttattcatctgtctccctccgtaacggtgttgttatgtatttttattataaatgtaattgaactgcaatttatgtcgaattataatgaaagaatgcgtatattctagaaaaaaacatttttatatagtatcttactctttcatgataccaaaatatgcgcaaaaattctaaagtctgttcgaatttgtagaaacaagtcttttaatgcttgtcaggagggtccagcaatcatgctgcacagctatttaacagttaaagaaacgggtgaacatgagattgtgattgaaaaatcgcgttttatctgtcacctgagccgtgctgcttctgaagaggaagcgcaggaatttatacaaaagataaaaaaacagcactggaatgcgactcataactgctcagcttatctgatcggcgaaaccgaccatatacaaaaggcgaatgatgacggagaaccaagcggcacagccggcgtccccatgctggaagtgctgaaaaaacgcggtctgaaagatacctgcgcggtggttacccggtatttcggcggaataaagctcggtgcaggcggattgattcgtgcatatgggaagtcagtgtctgaaggcttaaatcatataggagttacggagcggaagctgatgcgtattatgcatacatcagcggattatacgtggctcggcaagatagagaacgaactgagagaatcagtttttttactgaaagatatccattatgcggatcatgtcgaatttgaaacgtacgttgaagaaaaagacaaagaagcgtttctaaaatggatgacagaactgacgaacggcaagagtaagaatacagagggagaactgacgtatttagaaacagacgtcagccctaaaggagactaatgtaatggctgaacgtgtaagagtgcgtgttcgaaagaaaaagaaaagcaaacgaaagatcatattcaaacggattttgctgctgcttaccctcgttttgttagtcgctgccgggtttggcggatacaaagtatacaaaacgatcaatgcggcagataatgcatatgatgccctttcccgcggagacaaatcaaaattacgggataaagtcatcaatatgaagaaaaaaccgttctccattttgtttatggggatcgaaaattatgccaccagcggaaaaggcggacgatcagattctcttattgtcgttacccttgatccgagaaataaaacaatgaaaatgctgagtattccgcgtgatacgcgggtgacgcttgccggcgacacaaccggtaaaaaatcaaaaatcaatgcggcttttgctaagggcggagcggatgaaaccgtctcaaccgtcgaagacttattaggcataccgattgataagtatgtcactgtcgacttcaatggctttaaggatgttattgatgaagtaggcggggtcgatgtaaaagtgccgtttgacttcgacgagatgagtgacgtcagtaaaaagaaacggatctatttcaagaaaggaaacatgcatttgaacggtgagcaggctttggcttacgcgcggatgagaaaacaggataagcgcggagacttcggccggaatgaccgccaaaagcaaatcttaaacgcactgatcgaccaaatgtccagagctggaaatattgctaaaattgataaaatcgctgaaacagcgagcaataacgtccaaacgaatatccgaatcactgaaggactcgctcttcagcagatttacagcggctttaccagcaaaaaggttgatacactgaccataacaggatcagatttatatttaggcggaaccgcaactacgcgcggaacatattatttccagccggatccaaccaatctcgaaaaaatacggcaggaattgcagaaacatctggattacccgtccggaaacagcacggcatccgatcctgcttctgacagcaccggaacggacagtacgactgattcgacttccgacagcacgggaacaggcggtacggctgattcgccttccggcagcacaggaacaagcggcacgaccgattcaaccagcggtactgcaggtgaaaacggtacgggcagcacacagtccggcggcacaacaggctattaagagtaaacccgatcctttgagcaggatcgggtttttctatataataagagaatagcaaaaaagcagaccattcgcatgatctgctctttttaatttttctttaccaacctcttgtaaaacttggtaaatggtttaaattgttcatttactaaccctgtgacctctgctatgatttgcataaatacaatcaatacaaaaataataaacagcgaaagccatatggtcgcgcttttcagcaggatggcactgacgctgaaaataaagccgattaaatagatgataatgacagccgtacggtgtgacagcccgaaggccatcagccggtggtgtatatgtgacttatcaggcgctgagatcggctgtttgtttaaaatccgcctgatgacggcgaatgtcgtatcaaaaatcggcacgcccaaaatgatgatcggaatgatgatactgaataaagtaacacttttataaagacctaataatgagagtactgagatgacgtatccgagaaagagcgatccggtatctcccataaatatctttgccggatgaaaattataaaataaaaatccgagtgtgcttcctatcacgacaagtgaaagtgacagaataaggattttccctccggataacgccataacggcgatagtggagagtccgatgaccgacaggccggcagcgagtccgtccaaaccgtcaatcaggttcatcgcgttcgtaataccgacgatccataacacagtcagcgggtaagcgacccatcccaattctaaacgttccgttaaaaacggtacggagaaaaagtccattttcagtcccgtgctcacaatcataatggccacggccagctggacgaaaaactttacctttgcgcttaattggtatttatcatcaaggattcctaaaataacaataataaacgcacccactgtaatggcggtcattttcgtttcattatatatgccggccgcgagaacacccgccgctacgccgataaagatggccaggccgcccatacggggcattattttatcatgtacttttcggttgctgggctggtcaactgcacctattttgatcgcaattttttttacgataggagttaggattaaaaccgttagcagagagacaaaaaacgcaacaactatgcgaaacatgcgttcgtcaagcataaagaagtctcctttggaattatatgaagtcttttctgatattgaaccgttccttccattataattcttactagttattataacaagcatcatcaaaaagaaacacgcaaatcaaaaaatgcgctttcccttttaatgggattgcgcatttttcaatatacccgtgcattcgagcattcggccgaataaaacattccaatcccgtctccgggccaattcacggcgcaaagcctcatatgatccgctgcggtccgctgccagaagcgcgtcgcaggccgcgatgaaatctgcggggtcactgccttcaacgtattcatagacgaaaggccttttgatttttgacgtagaagaaaggttgcagccgacaaccggtttcccggcggctaaaaattcaaaaagcttaagcggaaataccgcgtcattataagttgaatttttatacggcatgatgccgatgtcgacaagctgcatataggacggcacttcattcggcgcggcaggtcccgtccagatgacattcggacgcttcagaagcgacttaaaatccggatcgtcctgagccgtgttcgggcctaccaataaaatcgtccagtcaggcctcacatctgccgtttccgccataagcgcaaaatcgagcttcggtttgattccgccgataaaaccgagaaccgttccgttccgtccccgtaaaatgtcttcatccggctgtttattttcccgtgaaaacaggtcatattccactccgttttcaatggtgaacactttctggtgcgggttctccagcttttttccgacctcgtggtgcagacagtcagatgtacacgtaatggaatcggcacgctgaatgattctcatttccgcctgtttaatgatgtttcttctaacatttgacagcacactggaccggccgctgatcggagcggcccacagatcactgcaatcgtaaatcacttcatcccaaggaaacagatctgccagcagcggaaaaccggggaaggtgtaccataagcagcagcgggccccttctccttcttccttcagcatgttcaccaatggtgaaagcttatgcctgtagcacatgtctgtatacctgccgaagcggaaagctttttgccgcatgagatcctttacagtgaactgccggattccctcggcgatctcggccatttgaccatcattggctcgcggagacgggcatacccaaatgacgcttttcgtttctttttgccgggcgagaaattcagccagccggtgccgtctgtatctcagccggtcatgcccccattccgccgctccgacgattacgtgaataatcggttccaccttcatcacccagctcctctgacgcctacagtcttttcatgaccgcgtttttcgcatattgcataaaacaccacgaagccttgataaaatgcaggcgctcaatttctctataaacaaaccacgttttttttgcggctttccacttgttgcttgaaatcgaattctgcacaagcctgtattctgaaaggcactcattcaggccgtaagccgtaaatccccttttcagcagggaaagccatgtcgctaaatcctgccgcgttctgatatcaggcatttgaatctgccccgtctgctctctgtcaatcatgaccgttaaacatccgataatcgtgttttttaaagcttcatcatatgacaggctttcaggggcttgaatcgttttgtccgtcggcgttccgtcctgctccatgacgctgtagcccgtaaatgaaaaagcgcaggaccgctctgccataaacgcaagctgtttttgaagcttttcctttttccatctgtcatcgctgtccagaaatgcgacataacggcccttggcatgtttaagggctgtatttctggcagctgcggctcccccgtttttatctaaataaacgacgcggatccgctcatccttttgttcatattgccgtaaaatatctctcgttccgtccgttgaacaatcatccgcgataatcatttcccaatgcgggtggctttgatgtaaaacagactgaatcgtgtcttcgatatattcacttgcattataagacggtgtaatgacagatacgaaaggtttccagtttgtcatggtcacatctccatcgcagatttttacaaggactctctaaaaaactcaggaatgacaatgaacataaatgcaactgcaatgccgatgaaaacgcccagaaccgctttccttttcggcggcatgccttctcccgccgtttcattcatcggctctgaattgatgatgccggccgctttcaggttcagctgcgtatttttcaattcgtataaaaatcgttccttatccactttggcgtccgcgctgacggtttctccttcaagcgcagcaatactctgccgcactacttttgcccgtttttcaaacaggtcctgatcattcttcagaaaagtttttatgacggcttgaaacaccgattcggtctcctgtttgttttggccgctgtagctgaccgtgatcaatgaatctgattgtgtttcgacagtcagtttacttttcacggccgctctttcttcgtctgttttatcaggcaaagcctgctttaaaaaggcatcgctcgtcaaaaggagcgggatttcttttgtattgttataaagcggatgatcataatttcccgcggcgatcgcggcttctgatgtaaaactgctgctcccgctgatttttgacggcaatacatatcccgccgcccctaacacaacgggcagcgcaatgatccaaataatattctttttgatacgccgggttattcttgtcaacatatccttcatctcgcatctccctgtttttcatagtacgccgtgacggcaggctccttttgtaaccgcctcaatatattgaccgccgcgatcacgagcgagagaaatacccagtggaaaaataaatttgatacggagcttgggctgatgctgcttaccaaaaaaccggccatcgccgtgataagtccttctgtgatcagtcttgactgattttccgattttctttcatgacatttataaagtgtccaaaaaaggaacaaatagactgtcaggtaaccgagcatcgtaagcacgccgaagttcgccataatctcgacgagccagttgtgcacctcaactacgccgcccgtatcataaacgggctccgcttttaaatagtaagagacgtttccggcacccactccaaacccccaggaatcaatcacatagtgaaaggcgttttttaaaagattcgccctcgcgaggttggaaggaagcggttgctgtcccggcatcgcctgcggagctgaaaacagattcaagacggcgttggtgatacggcccgcaaataaaaccgcaaacagcgctgcacccgctcccgctgcgtacaacgcgagctttttcaacagggaaggcagcagaatgaagacgtatacagccgcccccgcgcatatgcccagcagactcgcgcgcgaaccggtcaaaatgattaaatacaaagcgctgatcgcaaagagcaggctgacggccttcacatagccgtttttcatatttttcaccgccgccgcatacagaaagaaactgatgcacaaaaacgtcgcgaaatcattttgattaaagaaaacggacgtcggataatgctgtttgtactgcgggccgttataaagcgtggagctcggcagatggtggtgtgtaaaatggttgtaaaagccgatcgccatcacaaaaatggtcatcacaagccatatgccgtaaaaaaccatcagctgatcaaagcgctgaatgaacatgacaataagataaatcagaaacatgcccattcccattaaagctaaatatttaatcccgtacgtcacggattttgcccacaataacgataggagaccgtatgtaaaccataaggcgaaaaacatcagaaccccttttacattcacccgattccatctgtcaatatgatgacggtttgtcaggatgccggcgacgtgaagggcgcctgctccgattaataacagccggtatataaataagctgaaaaatccgagatggaccgcaaagaaggcctggtttaaaaatgtacacgcgatcagtatataaatgagccccataaacatctgaccgtttgttgtaaaggcggatagcaaagcaagtccggcaaagccgatcatggcggcaaacagcagcacggtgatttttccgaaaccggcatccgccctgaccgcctccagcatgatgaatcctcctgtaatgagagcggcaagcagcacaagaacatgtgccgctgaacgtttgatactcacatggcaaacccctttccaaaaccggcagccgagccgggctgccgagagcctgaagacaaatctttttctatcttgccagttcttttatttgccgatcggcatgaaccgccggacgtccgacggaatgataagtgaatcctgaaaccctcatatactccagcggaaacatatttctgccgtcaatgatgaccggctgtttgagcagctgcttcactctctgaagatccatctccttgacttccggccaatctgttgtaatcaggcatgcgtccgcgtttttgatggcactgtacagctctgtgtgatattcaatgccgccgtctcctaatatcgctgacgcttcgggaatcgcgatcggatcatacgctttcacgtgagcgccctgctctttaaggcttgtgatgatatcaagagccggggcagagcggacgtcatttgtgtgcggtttaaaggccagccccagtacggccgcggttttcccttttaagggaccgatggcgcggttcaatttttccgtaatacggacccgctgcttctcattggtttcaatgacggcttccatcatttgaaacggatagccggcggcgtttgcgatatgcaataaagccgttgtatccttcggaaagcaggatccgccgaatccgatgcccgcctggagaaatttattcccgatccggctgtcaagaccgacgccttctgacacgtgggaaatgtccgccccgacacgttcgcaaatattggcgatatcgttaataaaagatattttggcggctaaaaaagcatttgcggcatacttaatcatttccgcgctttcaagattggtctttacgatcttcgtacggaacggcttatgaagctcttcaatgaccgaagcggcatgttcgcttgtggcgccgatgaccgcccgctccatctgcatcgtatcccgcaccgccgaaccttcgcggaggaattcaggatttgacgcgacatcaaacggatattttccctttgacgcttcgctgacaatttggtaaacgagctttcctgtcccgaccggaacagtgcttttggtgacaatgattttgtatccgttcagctgttctccgattgtttgcgccgctgccttaatgtaggtcagatcggcttcacccgtctttgacatcggcgtaccgacggcgatatagatgatatcagcggctttcacagccggctcgatttcggctgtaaaggataaccgtccggtactgacatttttttcagctaattcctcaagccccggttcatatatcgggatgactccgtttttcaagcttctgattttcgcttcattgatgtcacagcaagtcacatgatggccgatttccgcaaaacaagttccagatacaagacctacataccctgttcctaatacagcgatttttttcacagcttcatccctctttcgaaaggttctcctcttgcccggcccggttcattacggatcggtatttctctttcagcgctttcgcgttttggcttgcgtcaaaatacgtgcggacggtttgataaagttcctcggctgtttgcggcgtccaagcctctccttcgtcatattgcagaatcgattctgccaacgtctcaggtgaacccggcttgatcagcaacccccggtgtttcccgaataaagaagccaatcctccgacatcggtgcagatcaccggcaccttcagagcgagcgcctcaatgaccacagtcggcatgccttcgctgtaggacggcagcgccattacatccgaagccagcagatagtcctgtaccttgtcgttcggcacttgccccgtgacgatatgagcggcttcacgcaatgaagatgcggcgggaccgtcaccgacaaagacggcttcatatctttcatccaatgattgaacggcttttgataagtcgaaaacacctttctctttgacaagcctgccgatgaacacgatcagttttttatccggaggaaggccgaggcgttttctgacggcttctttcgtctcgttcctttttcgaaaggcgtcaagcgtgatgccgatcggaagcacggtgcactccgcttcgataagctttttcatttgttcccgcagactgccgctcacagcgtaaatatcggctgcttcccgcaccgcaaatgtaaatgcgcgatgagcgcttttgctgtaatgcggatagacattgacatcactgccatgcaaggtcagcacatacggaatgcctaaagcctttgacacaatggcggccgctccgcctgacggcatggcgaaatgcgcgtgaatcagatcgggcttcaggccatgatttttaatttcggaaagaatggattccgccattcttttatgcggctgcgcccatttcagctgcccgggaaccgcctgataaaacggccggtggacggacacgcctttccgccattcatgcgccggcctgatatccttttgctgatacgtctttttcagcacccggaatggcgcggcgagtttcggccgcggacaaatgacggtcatctccgcgccaagctttctcagttcttgggcctgcgtctcatgaaaaacgccttctcccggcttctcactgctcggatagacacttgtcatccacaataccttcatagcaaacgtccttttcttaatttacttttcatatgcggataagcttttcctaacaggaataaataacacaacgcgccgcaggctacggagatcgccagccgcagcttgacatcaaggctgatccgctccgtgccgaagctggctgtaaaggcgatgacacccattgccgccgtaagcacaaacggtttggccacggctttgaagtaagccgacagccgcagcttaatgacatatgccaacagccagcgcccgatcaggaaattcaggatgctgatgaaagcgtacgtccaggctaccgtcaagagatttccggacagcacggcggcgtacaaagatgcaccatacagcagcatcaccccggcgtcccaataaaacgccagatcggcccgcccttttgcgagcagcacagatccgttcggattcatcaggacccttaaaatcccgacgatggcgagaacgtttaaaaccgggacagccgccagccatttttctccgaataccgaagccacgaatgcatccgacactgaaaccaaaccgagcaaaagcggaaaggatatcagcgcgagtattttggtcatattgagaaatccttctctgataacgctgttttcatgcttgtttttcgcaaagacgggaaacgcgactctcgtaatgatcggattaatttttaataccggaagcgtgacaatctggtaggccagattgtaaatgccgagcgcctcagcgccgataaaactgccgatcagaatcatatcaatattcgctccgagccggttcacaagccgggaagacagctgaaaggccccgaaagaaaagaagcctttcattcctttcagatcaaaaaccaacgccggtctccatgtttttctgcaggccatccagtacagaatccctttcgacgattgcagcagcacctgagaaatcacataggcgagaatcgggtccgtataaaaaaccgcggccgccaaatacacgaaggacagcacatttgaaaagatttcaatcttgcttaacgtgttaaatgccagcgctttttgcagcatatactggtattgctgaccgatcggcgcgattaaaaacataacggccagcacgcggattaaatagacaagctcctcccgccgataaaaatcggcgatgagcggactgctgaaaaacagcagcgcaaacagcgcaagccccgttatgatattcagccagtacaaggaagacatctgtttatcagtcacatgatctttttgaatgagcgcggcgccaaaacccatatccagcgcaatttgggcaaacaccactaccgttgtgatcatgccgacaaggccgaattcagccagtgacatgacccgcccgagcagggcgaattggacgatttgaatgaccgtaatacacgctgtcgaaatacttgtccatttggcgccgctcaagatttgatttgtaatactaggcatcgttttccctacttttttgtctgctgaccagaatttttatcgcgccccgtcaccggtccagatcactttgcacgttttgagcataatcttcagttccaatgaaaaggtcaggttgcggatataatataagtcaaacattagtttttccctcggtgtcatgtcatatcccccgttgacctgcgcccagccgcttaatcccggcttaacggccagccgctccgtaaaccccggaatctcatcctgaaactgttccgtaaacacgggccgctcgggacgcgggccgatcaggctcatttctccccgaagcacatttaccagctgcggcagctcatcaatacgggtccttctgataaaagcgccgacctttgtcacgcggggatcctttttcagcgcccagaccgcccccgatttttcagcatctattttcatagagcggagcttatacaaataaaacggcttcccgtctttgcctacccgctcctgcttataaaaagcagggccgggcgactccaaacgaatcagtatggagaacaggcccatcaccgggagcgccgccaagagccccgcaagcgcaaacacaatgtccatgaatcgcttaaaagccaaataacgggccgttctttccgtaacggcagcggaagtcccctgccgcactgcatagttattatttacattcatgcttttctctgctcccactgacacacacctcacgatttgttgggatgtttgatgacctatgccgtgagtttagcagatggatgttaattggaagtaaaggaagcgttaatgtttattagaatgtttcgattattgtttttttattgtaaatctattcatatccatatttgagacaaagcataatgaaaaataaaaaaacagaccggcatgaaccggtctgtttccatgaaaaaattatcggaaataggaggaaacgccttgggtgatccccgccgcgagtctgtcctttttcgttgattgttttaaaatattggcatcaatcgggcttgtgacaaaaccggtttctaacaagacactcggcatttttgaatatttaatgacgtaaaatccggcagttttcacaccgcggtcacgcgtcccgagagcagaaaccattttcggctgaatattttgggcaagcctcagactgtttgcggattggtacgttttatcataatacgtctccgtaccgtttgcactgctgttatcattcgcatttgcatggacgctgatgaaaatatcggcgttcgccttcgcccctttgttcactctctcctcaagcgagtcaaaggtgtcgcccttcctcgacattacagtaagcgcgcccgcgccgtataattgattgttaagacgcgtagcgatatcaaggtttacatttttctcaagcaagccgtttccggttgcacctgaatcctgatagccgtgccccggatcaataaagaccgttttgccgacaacgggatttttaagctgcgacgcggcattgttgcttaaagatgaagcacttcctatgacggtgaagctggtgatgtttttacttccgatatacgtccggacgtcttttgacagactgtctccattcgtcagcaggtgaactcttccctgtttggcgctcagcacgcctccgacgatggtatccgcctctttaaaaccattggtaacaaacgtatagcctgtgcttaagcctgtcttttttgcaagattcacagacaggttatagcggtttttgccgctgattcttgaagggttcggcagtttattgtaaagtgagctgctgatgctgcttgtcccgccgatgacaaccgtgtttttaatccctaagcttttgatcgcattggacgtagaaccatttaatgtcgaatcattagtgaataaaatcggatattttttagcggacgcataagaaatcgcagccattccatctgcatcaacaaacccgttgaccacaagggctgtagaagatcttgtcatttcacccgccacttttgcggctgtggcatatctcgtgctccctgataatcgtttgacactgatgcctaatttagcaatttgattttcagtatttttcgaaacggcaggtgtgccgcctacgataatcacatttttcgtttttaaatcaattaatcccttttttgtgccggcagacagctgatctttatttgtaaacagcagcggcgcatttttttgatatgaaagcggcgcagcggcaattgcatcggcatatgaagttccgccggtgataatgaccgttttcgcttcaccccatgattgttttgccgccagtacagccgtatcataccgggtgcttccgccgatccttttaaccgtgttgtcagccaaagcggaagggacaaatagaatgaccccgagaataaagacggggagacattttatgatgaatttcaatccgatctcctccacagaagtttagtagtttgtaagtgctgtattaggataatagaacgcaagaatagaagtatacggctctccggcctccgctctttcttttgctccgtattgactcattcctacgccgtgaccgtatccctttcctgatatcgtgatttgcgaagaattaccggacgcactggcgtatgtgcttttaaaagatgaagctccgatcatcgtcctaagttcagacgctttcacctcaacagatgcagtcttgttcatgacatagcctttcgacttgtcattcacatggtacgtgaccttcgccgcggcgtcttccgcgcgctggccttttgtttttccggtgagcgagagatcagagatgcttgcaatttttatggaacttgcattggtttctttatttttcatcagccaattttttattccgttgagctgcgcggcatttgcttcgtttgttttagaccaccaggatgcgggatttttcatatccagacccgctggcagctgctgcttctgcaatgttaaagaccagctgatttccggatcttttgtatcctttttggctactaaatacggcactttcgatccccacacttcatcgccggcttccatgtaaccgccattgcttgatgagtaagtggcatctatcaatctgccggaataagtgagcactttcccttttgttccgttaacggctgcggtggcgtttggataccagctgtatcccccgtaaacctgaaaggccgttgtatccgcgactgtttgtcccatcttgccgatagagtaggtgcgggcggcaacagcctgggctttcagcgcttctgtcggccagcttcccggcatttcattcggcaggacacctttcagataatcctcaaaaggaatgttttcattaacaggtcttacatatttgccggattccgcagtgaaactcatattccccagatatggcttcccgtcaatgctgattgtgtttgctgttgaatatttttcaggaaccgccttgaaagacgtttttccgctgttaatgcctgcaacgcctaatttgccgccggacgtttcaatacggtacgtctttccgtttacgagataaaactcttttgcgtaagcagccttaactgaatcggcaattgaattcgcgctgcctattaatgtataagaataggtgcctttcgttttaaaaaggctggcctcgtcggcgggtgtttcgctttttttgatgtatacaagcggcatgtgatttgcggcggcaatatttgatccgacaacgatgtccgctaatttagtcccgttggcagccaccgttttgcttgcatccatgccaagcgaagtgactgcgttagctgatatttgatatctgtttgatccggtaattcgtttggtgaccgaggccttctttttaatttgattctccacatctttgctgacgcttgaagtgcctcccatgatgatcacttttttaggcagattgtagctcgggagggagtcttttttcgtcaggagaatcggatagccgttttgcgcagcataaggcgcgattgccagcgcatccgtatatacatcccccgttactacgaccgcctggtcataactgcccatttcggccgcaatatttttggacagatcatatctgttttttccgctgatccgtttcgtgcggccgtatttcttcaatgtcttttccgcggctgacgaaatactgttcgtcccgccgatgattaaaatattatccggactgaatttcttgatttgcgcttctgtgctgctgctcagttttttcgcttcagtcagcagaacaggcgctttcagtttattcgctaaaggaatgacggaaagcgtgtccgcaaaataagcatccgtattaacgacgactatgttggacgggtttttccaatacttggatgtcgcggcgttagccgtatcatatttggacgcgcctcccaatctggcaacggaggagacatcgcttcccgtcagtttataagttcctgaaggttcgatattcagagtcgatttattaccaatataattcgtcagttttactgagatatcagaactggacgcaaaagtgctttccggtaataaagccaggctgaatatcacagaaaaacagacagcccatattgttttcttcaatttttatcccgccttttgctgatcatggtgtattattttgctttctcgatttccttgatctctttttggcctttatcatttgtgaaatacgtaatgctgactttgtcattttcgctgaatttattcagaacatcagagaagtcatcagaaaattcaaagctgacgggctgatcatccacttttacttcaattgtgtgcgtatccgccataccgacataatatgccgtttctttttgagcctgattctccgaagaaccgcttcccttctttgattgatccgccgttccgcacgctgccaatacaacagaaaaaagcagtattaagaacgaagctgcaatagtttttttcatttttttcacctcatctttatgtatcgtcttatactaacttttttttaaggtaattttaaggtctttttgtaacctttttttaagaatttcgtctattacatggttataagtaaaaatatgactgggtttataaagattagtaaattgcatcaggaaagttaatagaaaaggtgatgacaaatgagagctgaacgaaaaagaaagaagaaaaaagttcttctgacaatcgtaacaatcatcgggctgttagttttatcatcaggaggctacgtctactacttgtggcacaaagcggcttcaacggtggcaagcattcaggaagacttgaaaaaatcggacaaacgtgacacggatatagatctcggaaagaaggatccgatttctgttttaatcatgggcgtcgatgagcggaaaaatgacaaggggcgcgcggatacgatgatttatatgaccgtcaatcctaaaacgaatacaacagaaatggtcagcattccgcgtgatacgtatacgaaaatctccggcaaaggtacgatggataaaatcaaccactcctatgctttcggcggaacgcagatggccgcggataccgtcgaggacctgcttgacgtgccggtagattattttgtgaaagtaaacatggagagcttcaaagataccgtggatacactcggcgggattacggtgaacagcacgtttgccttcaactacgacgggcactctttcggaacggggaacatcagcctgaacggcgaagaagcacttgcctacacgcgtatgagaaaagaagatccccggggggatttcggcaggcagcagcgccagcgtcaagtgattgaagggattatttctaaaggggcaaacatctcgtctgtcacgaaattcggagatatgtttaaggttattgaaaacaatatgaaaacaaacatgtcattcgatgatatgtggacggttatgactgactataaaaacgcccgcagcaaagtcactcagcatgaactgaagggaacgggaacgagaatcaacaatatctattattacaaattagatgaagcaagcctcgcttcagtcaaaaaagaattaaaagaaagcctgaaataataaaaaaactctgcatatgggactgacccccgtttttgagacagggatcaaaacaccttcatacagccaattgccgatattgtatcggcgattggctgtttagtttcgtttgaatacgaatattgttataataatgaatgtattctatggcagtgcgttctacgatggcggtcgtagttcgatcaatgctgttaagatagaacgtttcagactttagtgaggaatgaaacgattcgatggaggcattatcagcgggcgtccctttgcgggacatgctcatggtaatgccttttgttttaacagctttctgatactcataagatgtataaacagaaccttggtcactatgtaacacgcagttttcaggaagtgttggcagctgatcaagtgtgtctaagacaaagtctgtgtcctgcttatctccaatcgtaaaagcaatcacttctccattgtataaatccaatatactggaaaggtacaattgtttctgtccataaggcaaatatgtgatgtccgttaccagtttttcaagagggcgatcagactgaaagttccgatccaatatattatcgaccacagaatatggctgcccactttttttacgctttttcatcttaacccgacactgccattgatttttctgcataatacgttgaacagatttatgattaatacttattctcttttttagtatggctgtgatttttcgatatccatatcgatacttgtgttctcggcacaacgtgccgatttgtttctccagtcgcatcttaggattactcttagtcagattctttctccatctataatatgaagtgcgtgaaatatctaaatggacacagatgtcctgtaccgtcatcgtcttgcgcaattcttctaccagtttgattgtcgtttccctatcagcttcctttccaattcgttgtacttttttaacacttcattctgttgtctcagataacgattctctgcctggagtttctctaattcagaagaatactccggaccctttccataagtatattgctttccaacaggctgttcgaatcggtgggtatccccagccttatgccatctaacccatgtctgaacctgagtcttatttttgatattcaattcctgcatgatctctttcataggcacgcccgccaatctcattcctacagccttctgtttgacttcaaccggataactcactcttgtccccatagaaaaacacctccaagttttatttcggataacaacggtccgttttcaaacttgaaggtgttttttgtttgtctcatattatggggtcagttcctatgatgcagagtttttttattctgtaaaaggctgcggacgggtttttctatagccgtaccgataaagcagttcttccgcaatccgttttgaagccgatccgtcaccataagggtttgacgcctttgacatccgttcatattcagcctgatcggttaagagctgttttgtcagctgatacaccgtttcttcatctgtacccgccagctttaatgtcccggctttcactccttcggggcgctcggttgtgtccctaagcaccaagaccggctttccgagagaaggcgcttcctcctgaaccccgcctgagtcggtcaaaatgaaacttgctttcgcagcgaagttatggaaatccacgacctccagaggttctattaagtgcaccctgtccgaatcagcaaaatgggcttctgcggcctcacgaactgcgggattcaaatgaacgggataaacgacttgtacgtcctcaaactcttcaacgactcttctgacggccttaaacatctgttccatcggcctgcctaaattttcacgtctgtgcgctgttaaaagaatcatcctgcttccttccagcttgtcaaaaatcggatgaaaataatcttcccgcactgtcgtttgaagcgcgtctatcgctgtatttcccgtgacaaatatagaatccggctttttattttcagaaagcagattctgctcggcctggcttgtcggcgcaaaattcacatcagccatcacgcccgtcatctgccgattgatttcctcggggaaaggagagtatttattatgcgtacgcagaccggcttccacatggccgacggcgatttgatgataaaaggcggcaaggcttccggcgaacgttgtcgtcgtatctccgtggaccaaaacgatatctggttttacttcttggaacagcttgtccagtttcagcaaagcatgagatgtaatttctgaaagcgtttgacgctctttcataatattcaaatcaaaatcaggcgtaatgctgaatgcttcaagcacttgatccagcatctgtctgtgctgtgcggttacagtcaccagcgaatcaatttcctgatatttttcaagctctaatacgagcggagccattttaattgcttcaggtcttgtaccgaatacggtcattacttttagttttttcaacggtttgtctgcacctcgttttatatgtcggatatcccttcatgttaacacatttatgccgtttcttagatattgtaaagcttaatggcaaacaaagcaaaaaccgttacaagactctttgaaagcggattaaaaggtgtgaattttaatcaattgtggtaaagtggaaaaagactaggttatagttctgaaaaaaagattttgcagaaacaaggatggtgttattcagtgaagaaagtacgcaaagccattattccggcagcaggtttaggcactcgttttttgccggccacaaaagcaatgcctaaagaaatgcttccaatcgttgataagccgacaattcagtatattatcgaagaagctgtcgaatccggcatcgaagatattattatcgtaaccggaaaaggaaaaagagcaatagaagaccatttcgacaatgcccctgaactggaacgcaatttagaagaaaaagggaaaatcgaactgcttcaaaaagtgaaaaaatcgtcaaatattgcggatatccactatattcgccaaaaagagccaaaaggactcggtcatgccgtttggtgcgcacgcaacttcatcggcgatgaacctttcgccgttcttctcggcgatgatattgtccaggctgaaaaaccgggacttcgtcagctgatggatgaatacgaaaaaacattgtcttcaatcatcggtgttcagcaagttcctgaaagcgacacacaccgctacggaattatcgatccgttaacaaatgaaggccgccgttaccaggtcaaaaattttgtagagaagcctgaaccgggcacagctccttccaacttggctattttaggaagatacgttttcactcctgaaattttcatgtacctggaacagcaggaagtcggtgcaggaggagaaattcaattaacggacgccatccaaaagctcaatgacattcagcgtgtcttcgcttatgatttcgaaggaaaacgttacgatgtcggtgaaaaactcggatttatcgagacaacgcttgaattcgccttacaggatcaggatatccgccataaattaattccgttcatgaaggatcttcttgaaaaagaagaagctgacgaatagaaaaagctgccgaatccggcagctttttttatgtgatctttactttttagacgttaccgtcagtgttttatcagcattgttcaccgaaaaagtatattcctggtttttaagcatgagcaaattctgattgattttgctgccgcctttttcacttaaagctgagatgtctgcgggacgcgataaatgaaaaatcacttcggagactgtatccttgtcaatcactacatccgtttttgcatcggatgtttttaatacgttccgtccgtcagccgtttgtccggcagctggatttttcagtttactctgcacatcgtcccggcttttattgagatatgagagaaactcttctgctgtttggcttgataaactgccgctgaaatcattaagctgaacatccgtcttttttaaagcattcactttatacagatcagtctttttcataaagtactctttatcgtttaatttcactttggccgcctggttattctcggcttctacctgcaccttcgtgccgaaacttacacttgcggaggcttttccttttatatctttttcagtataaaggttcgccttttcagcttttaccaaagcaggtttattcacagactcataaaggccggcatcgctctgtttgacgtcaccgaaagatgtaatcgcacgcagtggcttgtctgaaaacatcgaagcgcctgcgccgacagccagcaatgcaagcagcgtaatctgtatcgtattggcaatgaatttgggcttcgctttcttttgctgcgcctgactgattttctgttcctcggctgcccgcgttctgccttcaatctgctcgttttgatatttcttcttttctttctttgaaagcttgttgaaccaatccacaaaagctttatattctttcacaacggctttcgtttcgtcgaacatgcgcatttcgccgtaatgcatccaagccacccgatcacacattttctcaatctgtccgatggaatgactgacgaaaaagatcgttttgccgcgttctttaaactccgtaatgcggtccacacatttctgatagaaagtctggtcccctactgagagcgcctcatcaataataaggatgtcagggtccatatgcgccgatatggcaaaaccgagacgggatttcataccgcttgaatagcttttaacaggctgatctataaagtcgccgatatccgcgaattcaacgattttttcataaagctcgtctatctgccgattgttgagacccatcatcaagcattttaaacgaatgttgtctttaccgcttaattgattgtttaatccggcagaaatcgcgattaaagacggctgcccgttcatgtcaatctccccgcttgtcggcggaatgatctttgcaagcaaattggacatcgttgattttcccgagccgttgatccctacgaatccgatcgtttccccttcatagacgtcaaaagaaacatttcggacagcgaaaaaacctttttgatttctgtttgggaaaaacagtcctttaattttgtcagactgttttttatatagaaaatactgttttgaaacatttctgaacgaaacttttagtttcatcgtataatctccttactatattaaagaaagtcaacaaacttatctctgaatttcatatgaagaagtgaaccgactgttaataacagcagtgtgacgaaccagaaatacagcgtgtatttcacatcgtggaaaaaccactgcccttccataaagctgtctctaaagccctcgataatatagaaaagagggtttaacttcaagattgtcaaaacttcaggtctgtttccgaatttctccgcaatgtcccagaaaatcggcagaagaaaaaagagcagccttgtgacggcttgaagcaaaaactgatagtccctgattaaaacgctgatggttgaattaaacaggccgaaagcaaacataaaactgatcatgcaaaacaagtaataaatatattgcagccagtgaagcgtcggaaacagtccgttgctcagcagcacaataatataaatcgccatcatcacaaagtaactgaataaattcgatgctatcactacagaaggcagtgaactgatcggaaagttcattttcgacactaaatttatccgtttaaaaacgctgttagatgcatccagtatcgtcggactgataaagaaccagggaattaagccggccagcatccagacgatgaacggtacgctgtctccatttccaagcaccatatcatgtccgccgcgaatcccgagaccaaatacgaaccagtaagccagcatttgaatcatagggttgagaaactgccacaatatacccaaatagttcacttgatactttgatttcgtttcgtacactgcaagccgcataatcagcggaaatgagttgaattgctctttcagaatttttaccaatgcattcattctaatcttccttagtcgtaagttttaggtaatagctttgacttacaaaagcaccgctcataattgtaacagattacgatgtatttttcacttcataacaagcctgaatcccatgagcgcaacatgccgtcacttaagcaaaaaagcataattaacgtggttaaattatgcttttttgcacctatttacttgtccccgaaaatcacttttacggctttttcagacgattctccggtttctaaataacagaacttctcgtaaaaaggcccgaatgaatccggaagcttataatcatctgattccgtttcattgacccatttgataacgtcacctgtttctttgacaagcgggccgggcgcttctttttcaaagtcaaagtaaaaccctctgagtttatcccggtacgtttcgatatcaggcacataaaacagcattggtcttttcagatttgcatagtcaaaaaagacagaggaatagtccgttatgagtaaatcagagaccatatacagctcacggatatcttcgtagctggagaaatcatacgcaaatccttcatacggtccgagatcaaagttttccgccacgagataatgcattcgtaaaataatgacataacgatcgccgatcgcttctctcaattgatgaaggtctaaatcaaggtcaaacttgtattttcccttcttataaaattggtcatcccgccatgtcggtgcgtagataatcacttttttatcttgcggaagattcattttttctttcagcgctttaatgacagaagggctgttatccgtttgaaggaagtcattccgcggatatcccgattcaatcatggttttattaaactgaaacgcccgggcgaatatttcggttgaatatgcgttcggtgaaatcaggtaatcccactttgaagcctctgtcgtaaagttgcgcttgtatttttcagtgtttgttcccggcatatgcacttcatccatatctactgcaaggcgctttaaaggcgtgccatgccatgtctggacatatgtcgtatgctcaggtttcggaatccacagcggcatacggctgttgacaacccagtactcggctcttgccatggcgaacagccatttgaacgtaaagcgttcgatataaggaattcctttatctttaaatgtctgtgagtaagcggggtttacactccagcagagacggtattccggcatctctttgctcatgtattcataaatcgcccgcgggttgcagctgtactgttttccggcaaaactttcaaacatgacaaatttctgtttgacaggcagtttccccgcaaccctgaatcccgctttataagtgttttgtattcttttctcaataaactttttcagcttattctttctcttgcgtacaaaggaagcgccccgtttcagctttcctttcacaaaatactccacgcgggttctgaagctgtaatcgttcatcctcaggtggagatttttcgttttctttttcgtgaaaacgtgaaatctggcaggccctttctccgttttcaggatcgtgaattggttagggtttacttgttcagatttcagaacctttaacggtttgctgttggtgataatctcttcacccgtcccggcatcttcaaaaatgaattgaatatggaattgaaagattagctgctgattcaattctttataaacggcattcaaatcaatttttgtatcaaaacctatcgtgtcaagcatcgttgtgtcctgaacatattcatcaaggtcgtgtctcggcacgtcgtgaagcggatacttcagaatgagaggctcctcttcttttccttttttcattttcagaatcaggtttttttcttttatctttaaggtttctgccgcattcagccggaatgcaaaacctttcagatgtaagctgccgtcagattcgagctccatttcatcaatccgcgtgacgaactttttctgcagcagctttaaggagaaattccctttcttcgtcgtgtaagggaaaaagaacatatgatgagcctcatctttataagaagacagttcaataggttcaaggctggattttaaccgttttttactgatatcactgtcatcattgataaaggagacatagaaatccagacatcctttgccgtccgtatggtcagaaagcagatccgtgctcatgacagcatggtactccccgccttctccggccaaccgtttcagagggacggaaagttccgcttttgtcttacgatttataatctgaagagaaggctcttcccctgcagtgacattttcacaggatatcgtaatgctgaatgtctcttcctttatgttaagatgttttaacttgtatctgacaggattttctatacccataaaataagtctactcctctgtttcaattaaacatatccaatcacaatcatcattttgttactttcagtgaaaggttctccttcaccgtccggtagaattgatattgcagtccgttcacttctgccgtcaccttttcaccgtcgtctctgtttaacatgacacgttcataatcgttataaatgacatacataatataaccgccaagtccgactttttcaatgtcacgtaacgggatttcaaggacgtaccgcccgtctcccagtgactgaaccggaaactggtggaatactttcatgttatctctgtgctgaaactgaatatattgggcattatttctgtcctgtccgaacaagcggaacgtaacggtgaatttatgatcggcgaacaccgcgctttccgtttctccgtgcatgcgaagttcgaccagtttattttcttcatccgtcagcgggctttctaaataagccagtccgccttgcgtcacgatgtttttatcgggctcttttttggaccagcggaacagcttttcgacctcatcataccgtttttgagtcagcagacggtaggctgttttatgaatcggatgaaaaaatgtctcggaaatatcgtatttcgtcttctttaacacattcagaatttcattgaatttattgtagtaggcttctttgttttcgcttttcaggaagtgcatccgatcgaaaagacgcgtaatggaatcgaattcgatcaggcggttcatcgccatcttctctttttcagtatctaattttttgttcagaatatacttcattacggctatgttcgtgtcggttttttccattatattagtctgctttgtcagcgactcattattgtccattctgttcagataatagaccggttcggttgacgttgaaatatctccgcacgccaaaagaacatccataaaaaattgcttatcttcagcaaatttcatttccggatatctgatatcattatctcttagaaattgtaagttcatcattcttgcccgcgggccgagatgatagaaaatatgccggattgaaaaaggcgataccttcgctctgttcagcgaagactcatgtttcccgatcgttttttgaccgttcacctgcatttcgatcgtttttccgaccgcataatttacctgatctctttcaagcatgtcgaataagattttaactccgttcggcgcaaaccaatcatccgcatccaaaaatgtaatgtacttcgcattagccagctcaattcccaagtttctcggataagccggggttcccgtgttgtctttcaaaaagacgactgtaatattttcatacaattcggcgtactcagtcaggatgtttctggaatcatcagtagagcaatcatcgaccagaattaaagaaatatgctgaaagccgatgttttgaaggatcactgaatcaactgttttccttacatattcttctgcattataaacaggaacgactaccgctaccttcttctcttccgccaatgcttctttgtttaaaatggtatattcgcgttcttctacggacggcttggactcttttttattcaacttaaaaaagttactaagattcatctttaaattctcctcttattgtctagctttttttcaaaagcgcataacaaatatagcgaaaataaccttatattacaagaagtactccctatccggagggagtacttctttatcatctgtatatccgaatgtttcaattacaccccggcaatttcttttttaatctgtgtggtggaaatgccttcggttctagggaggtagatgacttcgcattgatctttaaggaaatcgaatttgccttcccaatcgtctcccattacgaacacgtcgatgttgtgatccgctacgtcacgtactttttgatcccagctgttttccggaatgacttcgtcgacataacggatcgtttccagaatcagctttctgtgttcatagctgtggtaggcctttttttgtttttgcaggttgaactcgtctgttgagatggcaacaacaaggtaatctccaagctgctttgcgcgctcaagcagtttaatatgaccccaatgcagtaaatcaaacgttccgtaagtaatgaccttcttcatgaaacaaaagctcctttctatcatcatacgtataacaagcaactgctctgaaatgctgcgcagctgtatccttaatcactaaagtgccaatttcgtactcatggaacctcattatatcacatagccctgaaaaggttaagccaatgtaaaacgaagttacattccacttattaacaaatgttattacaataggagtttagcagggtttttgcgcgtatgattaaagaaattgttatcttatttatatttttgtaaaactattgttaagtttatctgaaggtattatgttaaaataaagcttagcctaattcacgaaaaagtgaaagaaaatcccgtacaaaaaggaggacggcagatgcagactgaaatggtgcacaacctttcttatgttaatggaaatttacaggagtttatttcatatttagacacttattatatcgcacagaagcaaggagccgtcattgcgacggtcaatcctgagatcggatacgctgcggcgaaagacaaaggttatcatcaagtcatttcttccgcggatttcgtcctgccggatggtatcggcgtcgtgttaatgtcacgtttgacgcagcacccgctgaaatcaagaattgcgggattcgatgtgtttcttgcgctgctcggcctcgcaaaccggcagtctaaaaaaatatttttatacggagctaaacaagacgtgcttgacgccgttttgaaccggatcagcaaagagtatccgaatattgaggttgtcggagccagcaacggttatgaagcggataaacgcttcgtcgccaaacagatttcccgggcgaaacccgatctcgtgtttgtcgccttaggatatccccatcaggaacaatttatttatgaatacaaacatcttttccctcaggctgtatcgatcggtttgggcggaagctttgatgtgttcagcggaacggtgaaacgcgcccctgaatggatgatcaaaacgaatctggaatggctgtacagactgttgacgaatccgtggagatggaaaaggatgctgaacattccgaagtatgcttttaccgttttgagaaataataaatcaaataaaagcctgtattccaagcaggcagaagatcaaacgaaacagctttaaacaaataaaacagcaaaagagattggtaatctatgaacttgcgatctttattcgccgctttttattctatatatctgtctgttctcggcgttttgttcaagcctgtaaagcccaagaaccatctgaccctgctggtatcttttgaagagaatgcgcaggctctcatccgttcttacaaagcgcacgctgaatcgctttcttatgaaatgacggttttgtatacgagacatgccgtcagtctgaaaaaagagctggaaggtatcggctctttttatctaaacgaaaaacatccgctgcatcttttgaaggcggttttgatcctttttaagagcaaagcggtgataacggataactatttcctcatgacaagcgtcttaaaccgccggccgcagacgacatgcattcaggtgtggcatgcgaacggctctttgaaaaagttcggccttgaggatgtgacgaatcaaaaccgtccggcatcagatatcagccggtttaaaaaagtgtaccgctcgtttgactttgtcaccgtcggttcagacgcgatggctgacgtttttaaaaagtcgttcggcatacgggacggccagctgttaaaaacgggtgtccccctgactgacgtctattatgaagaacacaagcccgaactgaagcacaaatggccgaaaaaaatcatcctgtacgcaccgacattcagggattatgatatgcagtcctttcggctgccattcaccgaagaacagctcacaaacgcgttaaacggagagtatatgctgcttgtaaagcttcatcctgccgttttgcatcagatttcggcttcgtttgaaagcgaattgatcaagaacgtgtctgacatgcgtcttcatgatctcttgaaagccgctgatattttaattacggattactcttccgtgccttttgaattcgcgctcttaaataaaccgattttctttttcacatatgatctggaggaatatgatcaaaaacgcggattaatcgacaattatacgtccgtcattcccggaaaggcttgtcataacagcgaagctcttctggaggaaatgacgaaaaagccatttcgtgcagaagaaatgaagcggttctcagacaaatggaatatgtattcagatgggaattcgagtgaagcgttattgaaatttgcggaaacaaaaatgaagaattgtgctgaagcacctgcctgaatccgacggcgggtgttttttgcatgaagaaaagggctgaagcatacacttcagcccttttttatactttcatatacacgggaacatcatagtaaagcgtatagtcatccagcagtgagtataagctgtacatgcggtttacctgcttatacgcccagccgatgtctgtcgcatactgatgggccgcggctggagaccatctcattttatacagcgtatcctgctcgtatgaaggattgtgaatataagacgcaccgataaattgggctccgccgataatcgcggcttccggagtaaaccagccttgattatacgcgtattgtgcgccgtagtaattcgggttgctgtcataagccccgatgccgtacatgttgtaaacctttttaccattatacataatgccgtttgcaagctctgacgtgccattgcccgtttcaagcaaagcatgcgaaatcaaatacacttcattgatgctgtatttgccggcggctgtaataaaggcctggcctttccctgtcagtattcctttattgaccagcactttttgattcagttccgatgcgttcagtccggctgtctgagagagcttcagaaattgaaagtaatacttgctgtcttgtgcgaagtgagccggattgacatactgcccgacttcgtcactgctggcatttctccagcccatgctgagtttggcccagccgtttgtctggcctgtgatgctgactttatcgccttttttcaactgcccgataatattgccggagctgacttcgggggttgaccggacgttcaggacgtcggctgtgaccgttccggaggccgtattgatgtacgtaagcgatgcataagccgcggcatcagtctgcgggctgactgtcatttgttttttgaccatatctgccagcgagatgttgtaattggtattcatgatttgcggtccgttttttattttcaaaatagccatcgtccatccgtacagctttttcagcttttgggaggcggcgtccgctgactgcgctcccgtgaattgattgcgaatgcggagttcataaaccggatggctttcactcgtatagccggcctgtaattgtttggcgctgaaaaagctcatgcttttatttaaaacggttttactgctgaatgtttcggttttgatgacgtattgtgcagagccggttttccccgtctccttcacagtgccggccgctttgttttgcttgaaaaaagcagtcacgcggtcaatgtcttccttcttaagcagcggtgccgtttcaattctgaattgtgtatacgccgcttcacctgttttctgtgcggaggcggatacttttttccctttgaaaaaatccagtgattgcttgatctttgccgtatcaagcagtgattcggttgtgacttggtacgttgtgtccgtctgcttggatatcgtttttgaaatggcagtcagtttatatcccgccagcagattcaatcctttttttatcttcgactggtctgccgtctgctgagaaagcagctgatattcgttttctgatgtttttcccgccgcggttcttgccgtctttacacgctgctggcggaaaaacgcctccgcttgatctgcctgtgcagcggtaagctgccctgccgtgatccgataaacggacactgatgctgtctttttgacaggcgatgcgtcgcaatgccattttttctttttaaagaaagcttgaacactttgcagctgcttagccgtcagtccgctcatcccgaccgtgtaattatttttcttgccggctttttgatagcttccgctgacacccgtattcttcttgatttgggtgatagcattttgtacggcgcttactccgttaaaatatcctgactgcacgttgtacacggttgctgtttttctttgggcatacttttgaacgttccctttgacgcccgttttctgctgcagctgtttcgctaaacctgccgcatcatttgcatttgagatgtcagaggctgtcacggtgatattcggactggcctttgccgtgactttcagcgacgcctgcaatcctgtttccttttgaaaatcagtttggatttgagcggctttttgatcgccggagattgttcctgattggatctgaaaccgggctgtttcccgtttgatctgacggtatgacgctttcacgcccgtctgcttcgtcaacgcttgcgagagcgcttttgcgtctgcttcggccgccatctcagcagtcacgacctgcatgtacggctgttttgtccccgccggcttgacggcgccggtcacgcccgtttttttcgtcagttcggcaagaagatttttcgtctgccgctcgtctgatagaacgcctgatgtgacggtcacgtacggctgtttgcttccgcttgcgctgtaagtgccggacacgcccgtctgcttcgtaaaatctttcagcacggttttcgcatccgtttcatcgtgtaagcctgaagctgagatttgataagtgagcggcgtatttccggctttctttgcgtcagcctgccaccccgtatcctttttcaatttcgctgccgcttgaagcgcctcgttctcagaagcaaattgctgcttcgtttccagctcgtaaacggagtagtcgctgtatgcggcctcagcgggctgtgtaagtgtgcaaaagacaaggaaaacggcggacaataacataggtgcaacgaatctctttttcattccttctcctctttctgattcaattggtttctatcaaactagtttatttatcggccggccttcttcttttttacagagagaaatcacccaattttccaaataaaaaaacttaatcccagactgggattaagtttggttttatatatgagaaacgatgagcgtgcaatctccgtttatcgtaaagtcaggcatctgatccggcagtatgaaatgcgcgcctttttcaagctcggcggacttgccttcacagatgatggagccgcttccttctgtgacgctgcacagcataaacggagcgtcctgggtcatttccgccgtcccgctgatatcccatttgtatacagaaaaatattctccctgcacaaaggttttgatggtgacgccttttctcgtttcagttgattcatccaaaaatccgtccacatgaggaacggtggcggcgttgacggcatcgcggatatgcagctcacgcgcctggccgttttgatctgtacgcccgtaatcatatatccggtaggcggcctctgaattctgctgtgtttcaagcacgagcgcccccgcgcaaatggcatggatggttccgctcggcacataataaaaatcgccgggtttgattttcacacggcgcagcaggccttcccagtcaccgctgttaatcatggtgacaagttccgctttcgaacgggccgtgtgaccgtatatgatttccgcattttctttacagtcaataatgtaccagcactcagatttccccgtttcaccctgtccatgctcctcggcgtcataatcgtcaggatggactttaacagactgatgatgtttgacgtccagtattttcgtcagcagcggaaaccggtccccttccgttccgccgaataattctctatgctgatcccacagttccatcaaggttttcccttgatacggaccgcttttgaccgtgctcattccgtgcggatgggctgatatcgcccagcattcgccggttgtttctgaaggtatgtcatatccgaatcgttcgcgtaataacgtgccgccccatagtttttctttacatacaggctgtaaaaaaatcggctcttgcgtcatgttcgttcccctccccttaaaaagcggctcatatcccattccccctgtgtcttttttaaaacacggagggagccgcggttaaaacaatatgtataaaatggctgacctgctcattataccattcggatgaggcggaatgctcagtcatttcctattccagaataaaatgccttgtttgtcgcaaattaaaataactgatgaaaaaggggggaacattgtgacgatacatgcggagctcggcaaaaaccttgaagcgctgaaaaaacgattcggccaaagcgatgacatgatgttttattcgtttacgtacggaaacggcaaatgtgacgcctgtcttatctatatagacggactgaccgacaatcaattgcttgcggaatatattatttcgcccgtgcaggcggccgcccggcatcaagaggaaccggctgaaacaccgccgtcatccatctctttcggctatcgtcacacccggctttcttcacttaaggacgcggaggcagacattttctccggcaaatcggttttgctggcggagggatgggaggaagccctttcgtttgagacggaaacatttaaaatgcgtgatattgaagaaccggcttcagaagtgcttgaacgggggcctaggataggttttgtcgaaaagctccgaacgaacacggcgctgttgcgcgagcagtccggtgatcccaacctccagatcaaagagatcacactcggcgaacggacaaaaaagcggatcgccgttgcctacattcgggatattgctcctgatgatgttgtaaaagaagtgatgaaaagactggattcgatcaccattgatgacattccggaatcaggagcgatcgagcagcttattgaagataacacgtattccattttcccgaccgtcttgacgaccgaacggcccgaccgggttatgggcgctcttttggaaggaagggtttccattcttgtagacggaacgccttttacccttttggtaccggctaccgttgatgaatttatccactcccctgacgattataatcagcggtgggttccggttacctttctcaggctgcttcggtatacatgcattttaatcacgatttatttacccggcctttacatatcgctcgttacgtttcacacggggctcttgccgacgagaatggcggttacgattgccggaagcagattgaatgtcccgttccctccttttgttgaagcgttcatcatgatttttacgatcgaaatgatcagagaagccggactcaggctgccgaagccgatcggacagacgatcggcctgatcgggggcgtggtgatcggacaggccgccgttcaggcgaacatcgtcagcgcgatgatggtcattgtcgtatccgttacggcattggcttcttttacggcgccctcctatgcgttcaattttccgctgaggctcatccgtattttttcgatgattttgtcggcgatattaggtttatacggactgatcatgtgctatctgcttgtcgtcggccatctgatgcgtctgaaaagcttcggccaggactatcttattccgatcatggcgcagcctggccaagacttaaaagatacgatcgtcagactgccgacgcctcttttgaaaaagcggccgtccagaaaagagacgaaagataaaatcaagcaaaggtgatccccatgaaaaaaccggaagacaagctgtcgtttatgcagacacttctcatggtaagcggaacaatgatcggagcgggcgtgttaacactgccgcgctccgccgcaacagcggacagtccgagcggatggatcattattcttgtgcagggtgtcgtgtttatcggcatcgtcctgctctttatgccgtttttgcagaaaaacagcggggaaaccatatatgagctgaatcaaagcatcatgggacgcgccatcggttctcttctgaatttattcatcagctgttattttgttgtcaccgtctgttttcaagcccgatttctcggtgaagtcatcaattactttttactgaaaaatacgccgatgagtgtcgtcatattcatctttctggcggtcggcatctaccatgtgaccggcggggtctatcccatttcaaagctttatgcctatctgttcccggttacgatcgtcattctgattatgctgcttatattcagcctgagactgtttaagctggatttcgtccgcccggtcatggaaggaggctacaaaagcttttttgagatgtttccgcggacccttttgtatttttcaggacttgaggtgattctgtatctggtgccgtttatgaaaaatccgaagcaggcgaaaaaggctgctgtcttcggcatcgccagcgcaggcttattttacagcattacgctgcttgtcgtcatcggctgtatgtcggtcgctgaagccaaaacggtgacgtatccgaccatttccctgattcacgccttggaaatccggggtattttcattgagcggtttgatatctttcttttaatcacgtggacatgccagcagtttacctgtatgctcggctcttttaaaggggcgcatctcggattaaacaccattttcagactgaaaaataaaaacaatgcctggctgatggggagcttattggcagtgacattcggcctttcgatgtaccccgatgatatcaacagcgtgtttgcattcgcgaatattctcgggtatacgttttttgccgtcattatgattccttttctcatctggtttgtcagctggatgaaaaaaatagccgggaggaaacagacgtcatgacacttttcataaaatgggcggcggcgcttttcatactgatgacgctttcaggatgctgggacgcgaaggaagtcgaaaagctatctttcgcccggggactggcgatagacgagacgagtgaccgccgatataaattaacctatcaaaacctgctgccccaaagtgaaaacagccaggcttccggccggcccgtgtttgtcaatgtgacgacgcggggggataccattcttgaagccgtcagtgaagtcgctttaaaagatccgcctgtttacagcgatcacttaaaagtgctgatattcagcgacaaattgctggccgaccaaaatatactgcagatgatgaatcattttatccgcgatgatgaattaaggcggagcagctatctcttcgcggtaagaggaaaagcgtccgatattctgacggagccgacgccgaatcagcagcagcccatggccgcggaaaagctgatcgaccttacgaacaacggaaactacaacggaaagattttacaaccgctccgaatcgggagagcttcaatttactgccataataaactcagttttctcattcaggccgtcagcagccaaaaaggaaaaacggtgtatgacggagcggccattatcaaaaacggaaaacaaaacagattggcgggctttctgtcatcatacgaaatacagagcctgaattggctgatggggacgatacggggcggcgtgctgcccgctttggataaaggggggcacccgattaccttcgagatcaaaaaatcaacatccgccatcactcccaggctgaaaaacgggaagctgtcatttcatgtagcggtaaaaacaaaaggacttttgtcagaggatcaatatgccggagaagattcattcaatcagcactatttaatcgggctggaaaagattttcgaaaaaaaactgaaaagcgatgtgaaagaagtcatcgataagctgcagaatcaatatgaaacggaccctgtattcttttctgacagagtccgcattcaatatcccgactattggaagaaagtaaagcaccgctgggatgagaccttctccgaagcggcttttgactatgatgtttccattcagattaccaacttcggaacgatgggacggtagccttcagcgtgttttttcgacatggaggagaatttgataaatccggctttgttcgggcagctgtatcaccggaaattgcatcgattgcgccattcgtgtgatttcctgtaaaaacagctgcacccgctcatccacgtgaacatacgtataggactgctttttcacgtcaaatgtctcttccggaaagagcgtgcgcaccgtctgcggcgtaaaaaaccgcaagtgggtgcggtcgagaataccggcgtctctgtatgtccagtcaccgagcagaagcgggaacagcgcttcggcgtgggaaatattcggaatgctgcaaacgattgatccggcaggcgacaaataggatgagtacgtttcaatgacgcgccacgggtcttttaagtgctcaaggatgtccgcgaaaatgatgcaatcaaaaaagccttccggataaggcagcttcacttcttcgacatcttcctgcagaaccgctttataatgcccttttgccgcttgcgccgccagcgggtgcaactctattccgtacagttcgcaaggctgtctgttttgaagttccagccccgtagctcccgcgccgcagccgacatcaagtatccgtttcgcctcccggggaacgagctccgcaatttccggtctcggatgagtaaagtacgtaaaatcagtgccccatttttccgtaaaacgctggcggttctccgaatataactgattgatattgatatcctgattagccgtaaacgtcgcatgtccgtggtgatgcacaaaggcatcgagggcgatgtgcaggctgtagcctttttgcagggcgcgcagacataggtcatcatcttcaaaagaaccgtatccgaattgttcatcgaacgggccgatgtcttcaatgacgcttcttttcaccagaagacagaagccgacaaggcgcagcacccgctttgtatgatgcttttcccgttcgcaatacgcctccgcgaatgactccagttcatcaagcgattgatatgcgttatggatcatttgcgcgccgctgacatagttgctgacgggcccgaccataccgtttttttcagattgatacagcaccctcagcatggaggtgagccaatttttcgtgaccatcgtatcgttgttcagaaacagcagattttctccccctgccgcttcgattccctggttgcaccccttggcgaacccgaggtttttttcatttaggatgactttgacgtcaggcagatttgatatgtattctctcgttccgtctgaggaaccgttgtcaactataatcagttcaatcttatctttgtcggtgtatcgttcaatgctggccagacattttttcgtcagctcaagttcattatatgtaaggataataatactcgttttcaccggcatccccgcctttatcgtgactttatacaacgtatgacatatccccgtcatttatgtgaccgggcgcccgctcggcatccgttttgagggggccggtgaataaccgcccccctaaaactgaatattacggatgaactgtccgccgatttgattctgatcccgagcctccgttacggcttttcagatcctgctcaatttcttcaaggcttttccccttcgtctcggtcactttaaaccggacgaacaggaatgccagtatcccgatcgcggcataaatgagaaataaatagctgatgccgactgcttccattaacatcggataggttaatgagacaatcaatgttccggcatgcagcattaaagtggagacacccgtcccgataccccggacatgcagcgggaataattcaggaagcatgacccatacggcaggcccccagctgaccgcaaacacaatgataaacaggcctaaacaaatcaccgttgtccatgatgcggctgctgaatgttcaaagaaaagattgaccgcggccaatacgagcagactgatgaccatgcccgcattaccggccagcagcagcggcttccggccgatcttatcaatgactttaatagccgcaagcgtcatgatgacattgacggcgccgattccgaccgttcccaatatagacgcggaattgccgaacccgacactggtaaatgttttcggggcgtaataaataattgtatttgtcccgatgaattgctgcaaaaaggcaagtccgaggccggcaatcagcgcgggtctcacccacggctcaaacaattctttcaagccgccttcgttttccttttccgcttctttcatctgctcaatctcatcatcaatattcttcgttccccgcaatgatgaaaggatttctcttgctttctcttctttgccgatcgtaaacagccagcgcgggctttccggcataaataggattccgatcagcagaatgactgacggcacaaccgcaagtccaagcatccagcgccaagcgcctgcatcggcaaatatatagttcacgatataagaaacgaagattccgaccgtaatcatcagctgattcagcgaagaaagcgcccctcgtttatgcttcggagccagctccgataaatagagcggaacgatcgttgtagatgttccgacagccagtccgagaatgatccggaaaagaaccatcacctctgtattcggggcaaaagcgactcctaaaccgcctatacaaaacagcagcgccgctcccatgatggccttccgcctgccgaaccggtcggtcagtttgccggcaaaccccgatccgagaatcgcccccgccaataacgaactgacgacgaggccttctgtaaaggcgttcagtcccagttcttttttcataaataaaatagctccggaaatgactccggtatcatatccgtataacgcgccgccgagtgcgccgaaaaaatagagccatttattcgagtgtatgcttttcatgttatgtagactcccttcatccaacgctgtatccgcgcggaattgttctactgcttcttttacctgttttcgtccgtttcaaaccttccgcaccgttaatatccattattttactaattattttttacaaagcgacgaaacatttcccgcttcctgccgtccaatataatgtgaacctgatgcaaaaataacagtagatgttgtcgaaatagagagaaagattttgaattttctcatttgcagagttgctccaagtcaacaattatggtacgcttcacaaagaatagaaacgagaggtaatgatatggaagaacgatctcaacgcagaaaaaagaaaagacgcctcagaaaatgggtgaaatttgtactggtattcgccgctttcttattggtgatcgccggttccgtcggcacctacgcatttgtgaaattgaataatgcgaccaaagaagcgcacgtcagccttgaccgcggcgaccagtccgtaaaacggatcaaagaatttgacccgaagaaggattctttcaccgtattgcttttaggaatagacgcccgtgacaataagggcgaatcagtagatgacgcaagaagtgacgccaacgtgctcgtcaccttcaaccggaaaaagaaaacagcgacgatgctcagcattccgcgggattcctatgtcaacatcccgggacacggctatgacaaattcgcgcacgcacatgcttacggcggttataatttaacttataaaacagtagaaaacatgcttgatattccggtagattatgtggttgagagcaacttcgacgcgttccgcgatgtcgtcaatgagttgaacggcgttacggtaaatgtgaaaagccagaaagttgccgatcgtattaaagtcgatacaaaaggaaaagtcgtgctgaagccgggcgtccagacgcttgacggtgagcaggcactggcttatgtaagaacacgcaaagcggacaccgatctgatgcgcggacaaagacagatggaagtgctgagcgccattattaaaaaatctaaatcgttaagctcgatcccatcttatgacgatatcgtcgacagcttagggaaaaacttaaaaatgaacttatctcttaatgacgccatcggtctgttcccgtttatcacatcgttgaaatcggtggattctttgcagctgacaggttcagacagctatatttacactcctcagtacggcaaaaatatttattacttcaagctgaatgaggaaaaccttcaagaagtgaaaacgaaattaaaaaatgatttaaacgcgtaagacgtcacggcgggattagcaaatcccgccgtttttctgttgaaaaaaaggacatgaaggtatagccttttaactgaaggctttctgctgatttcgcacaaagctgaacatactacatgaagcagctttatttttaaggagggcatccatacatatgaaattgatagccattgacttagacggcacattactgaactcggacagtgtgatttctccggaaaacagagcggctttacaaagagcggatgaagcgggcattctcgtggccatctgcacgggcagagccacgtttgatgtaaaagcgctcttgaaggatttagatattcctatcattgcggcaaacggcgggacagtccatgacaaaggataccgcctcgtcagccggctcttaatggatcagcaggccgggaaggatatagccgcttatttaacggacaaagacatttactttgaggtctatacagatgatcatctgctgtccccatttgacggcgagtccaaactgcaggcagaactggatattctgaaaagcgccaatcccaaggaagatattcagacattatgggagggcgcaaagacgcagttcaaacaattcggcattaaacccgtacaggatatacaggcgatttttaacggagacgaacatgtttacaagcttctttgtttctcttttgatatggaaaaactgagaaacgccaaagaagaaattacacatcatccgaaattatcccagacatcttccggaaaacacattatcgaaatcctccctgccggttccggaaagggacgtgctctgacggagcttgcctcactgtacggaattgaaaaacaagatatttacgccatcggcgacagcccgaatgatttctccatgtttgaagcggcgggaaaccgcatcgccatgggcaatgcgattgatgaactgaaggaaaaaagcacgtatattacaaaaagcaacgatgaaaacggcgtcgcatatttcatcaaccggcttctcgacaacgatcaataaaaggaaaaagccaggtctttcacggcctggcttttcacgtttcccaaaaaataaattcccaaaaatgaaaataaattgtaatataaagaaaaaaggagtttcatgatgtcgaatgcaatcgctattataggatgtttagcttttctctgcgcagtcggatacggaatattccacctcatatgcaaagcggccaaaaaagaaaaacgtttttcaaaaaagctgttttggccccttctcatcggcggatttatcctgcttctgaccggcgcctccctcgcagagccggacgcctcggccgtgaaggcagaggagaaatacagcacccttgataccgcttatcaaaaattgacgaaggaacaccaggcgcttgagaaaaaatatgaaagcatcagtgccgcggccgaaaaggagaaatccgaagccgaagccggcaatgaagaaaaactcagcaaactcagccaagagataagcgagctgaaaaaaacaaacaaatcactcaaacaagacaatgagacattaaaaaattcacaaaagaagctcgaaaagaccgctgaaacgcttcagtcagaaaataaaactttaaagcggcagaaagcagaaacaaaaacatccgaaaacgcggaaacggcgcaaaacaatgccccttcctccggcggacatgccgaaacgaaagcagccggcacctcacagggatgcgacattaaaggcagccggaacggcatttatcacacgccgggaagtacatactacgaccggacgacagatcccgcggaaatgttctgttccgtagaggatgcggtagcggccggatacagagcgccgaaacggtaaaagaaaaagacgtcagagacactctctgacgtctttttttacggaagccggatgccgcccgcatatttgtccttccaataagcgcttgtgttcatatttgttatggtaacgcctgcggacacggtgacatgaatcacttgtccgttcccgatataaatggccggattcaggctttccgctttaaagaagaccagatcgccgggcttcagatcttgtttatcgaccggaacgcccgcctgcatctgcttgtccgcataacgcggcaggctgattcctttcgctttttgatagatgtattgaacaaatcccgccgtatcaaagccggtttccggtgaaacgccgcctttcagataagaaattccgatatgatcggccgctgtggacacaacgggattttctttagaaatggctaaattgctgaatcggcgcacccctgtaaaatgttttttccagtaatcttccgacaagtaagaaatggtgacttttgcggagcggcttgcttggatgaaccttccttctcccgcataaatgcccgcatgggaaattccttttttatacgtgtcgctgaaataaatcacgtccccgggctttatgccgctcagtttgattttctcaccgaccagccactgctgttccgctgatctcggcaggtaaatgtgaagcttgttttcaaaaacatattggaccagccccgaacagtcgaatccctcctcgggcgtgcttccgccgaatacatacggaatgtcgaggtaacgggctgcctcctgaacgatcgggtcatcagccagttccggatcttttgtaatccgctttgcaccaagatataaattcatccaataactgcttttttgaaagcgtgtgacggttacgccttctgacggagaactgtgtatcatctctccgtttccgatataaagaccgttatggacgggcgcgttttgtgttgaatccgactttttgaaaaacacaagatctcccggtaaaaggtcattttctttgacggcggctccgactttccattgatcactgaccgttctcggcagatggatgttctgcctgctgaaaagataatgcatcaatccggacggatcaaaaccgtcctcaggctcttcgcctccgtaaacatatttatttccgacaagtttttgcgcgtctgaaaccatcaggacagaaacttgagaatccgcttcagcaatttccgttctcgttactgcgggtgccacaagacaaatcataaggccggcaaggatgtacttcctccagcttgtgagcatgttttctattcactctcctcatttttagtagtttttacatcggtaacttttaacaaatgtttaggagagcacacaaaaaaagaatgcccgttatgggcattctttactggattcggaacaaacaatatgccggcaagcggaatcatgcgcttattttgcgcccgctgtgtcctcttgctgaattttttgcatttccgtgtcaattttttgtttttcctgatctgtgagctgatcattgtatttaaacgcagacataaacataaataccataatgatcgcggcaaacggccatcccgctttaatgattttcatttgtttttcactccgctttcttttttaagatatcgctgtgatccacatcaaacgttaattttccatccttgacgctccaatcgaaattcgattctttcgtcagttcacgtacgatcgttttatgattgatgctgccttttttaaccggcgcaggcgtcgcttcatgaatattcatcggcgtgacttcaaagcgtcccgtgccgtttttctgcagatgatattgaacaagcgccgtgtctctcgttcttgtccacccctggtcgaatacgaagttgcccaggctgtagaaaataacggtgccgtggtacatttcgatcggttccagcacgtgcggatggtgtccgacgataatatccgctccggcatctgacattgctcttgccaattggcgctgtctgtcattcggatcattatcatattcctgtccccagtgtgtttgaacaatgacaagatctgctttctttttggctttagaaatcatcggaataaacagctctggatcggccggaagcacacccggcgcatttcgtttagctgcaaagccttttccggaaacatcagtgaaacccagtgttgcgattttgattccgtttacatcttgatacgaaatgttctgctcggcttccttcagcgtgaggcccgcaccgacaagttcaagattttgctttgaaaactcttcaaccgtatcccgcattccttgagggccgtaatccatcgcatggttgttggctgccgtgagaacggtgaaattcatgtccttcaatacttttacggcatctttgtttgattgaaggtggatatttttttctgcttctttgtagttctttttatatgtaaccgggttttcaaagttccccgacacatagtcggatgcttcgaagaatggctttgcgtaacggaagacactctccgtgcctttatgctttgtcactttctcgacattccggcccatcataatatctccgacgaatgaggctgatacaaggtcatcggcatttcttttcacactcggcgtttccgccttccctgtcaggatgcagacgaacatcaggcaaaagacgatcggcagcgcgataaaaacgtgaagattggtcttctttttctgctgtttggtcagcttcagcagtttttcttgaaagcttaattgttttttcatcgtttgacacaccttacattagattaagtagtaagcaaacataatggcaaaagttgcgccgcttaagaacagcgtgctggcaaatgtaatcgttaatccctgtttctgaatggtattggcgatcagacccggtacgatgataccgattcctcggaattctgatatctcaaacggtacgatcgggtaaaggaaatcaagggcgatttttaagcagattcccgttatcagcatagctgcgaattttctgcgtccgtacaaaatcataaatctggataaaccgtatttgacgatcacgtatgtaagaagactcactaacaatacgagtaaaataaagaccggctggttaaaaacgagccctaaataacccggcacgactaaaccggcaggtacgatacctgttttttccgcgaaaattaaactgattaacacgcctaaaataagtgagatgtataaatctgatccgaacatttatccttttcctcctagctaacgagctgtttcaccttatactcttgaattttttcaattaatggttccgctgaaccgtggatattgcccacgccatatatgacacggttttgcattcttgttttcagcacgtccatgatttcgtctgttgatttatattccagatcgtgcaatgtatcggcaggaatcttgccttcttcataagctctgacgatcggttctgtcgtctcgccgatgagtatgagttccttcgttttaatgtacggaagcacgtcgtttgcgaactgaatcgttctgtccacacggtcggcgcggcagttcatgataacgatcggttcatctgtcgggtagccgatttcctttacacgtttccatatatttaaagtagaagatgcatcatttgcggcaaagccgtttacgaaatgaccgggctccttcgtgctgagcagcggcaggattctcatggcgccaggatcaggcggcgcattcagcattcctttaaacgccgtttcttcatctatcccaagagcctgggcaacgccgagcgcaagggaagcgttatcaggaaagaccatatattcaaattttcgaaggtattcatctgtaattttagagttatccgcaataatgacctcggtattccgctctgcggctttttctttaaagaagtctgtgtattcactgtctgtaatgacaaggtgaccgttatacggtatcgtcgcggtaaatgcttcagcgatttcatcaagcgtcggccccatgacgtccatatggtcttcaagcacattcacgatgacgccgatgttggcttgaaggagttcttcctgaaagataatctgataatccgggtttaccgccatacattcactgacaatggcattggcgccccgttctacggtttccttcattacttctttttgctcgccgatattcggaccctgcggtttccgtttgatcggtttctcctcaggtgtatcccaatagatcatccttgcatctgttcccgtcgtttttccgactgttttgtagcccgcctccatcagtattccggtcgtcagcctcgttacggttgactttccgcggataccattaatattgacgcgtactggcagagcatcgatattcttctgatgccgccttttttcaatgattccgatgattagtacggcagcacaggctataatgagtaaccacattgatttttgacatctccttctgtattgataaattcattcatcagtatatagcttcactatgaattctcaatcggcattatgtaacataatcttcccgctttcactgagccaaacttctctattagtgacgctattcttcctattatcgaattgctttttttgggaataggcaggacttcaaccttacttcaatttttcaaaagaaaaatgaatgcgtttacattttcacacagaaattcatttggaccaatggaactattcgcgttccggaagaaaaagatgtaatgataatccatcttttccagcccgtttgtatcagcgtttttcgcactgcgcatacgtttcgggactctctgtccgctgtgtgcagactgcctgttttgttaaggataaggtcttaaagtcattcatttttcccccgtatcctgctttcagtcccattccaaaataactagcggaatgactggtacatgacagaaaaagacgggtccggagtgtttacaagaaatacacattttatatgcggaaagcctttctccttttaaaccatttacaggacgtttatcactcttttgaaataattttaataaatctttatattcgttcaagaaatattcatccataattgtgaagttcttggtaaaacatcgaggaactcctctattttataaaatgcataaaaaaggaatacccgctgaaaactacagataaccggggaaggaggcggtctgatgtctgcggataaacaaaacaaacggattcccggcgattttgaatcggctgtacgggaaatgcaggagctgatgtgtgtttgcggtgattttaaaatacgaaggatcaaactgcaggaccgtcataccgctttcttttatattgaacaaatgatagaagaacagaagctgaatgagtttctgttaagcgacaccctgcagaacggcccgcttgaggaaacgatgaatgccgtcagcagtgcggaaacggatgaaaccagaaaactcattgacgggattttggccggccaggttgtttttctcagcgatgcatcaaggaaagcgaagctgttttctgtcgggcagaatccgctgcgttccattatggaacccgaatctgaaagtatcgtccgcggcgcccatgacgggtttgtggaaagtttggaaacgaacattcatcagctgcggtttcacatacaggaccgccatctctccgttcattatatggatatcggggaaagagccaaatcaaaggttgcggttatctttgttgagaatatcgccaatccggagattgtcgaggaagtgaagcggcgcctgtcatacttgcgtatagacagcgtgcttgcgcccgggattatcgaggaatcaatagaagataattcgttttccatttttccgcagatcattcatacggaacggccggataaagcaaaagcatgcgtgatggaaggctgtgtactgatcatgatggacgggagtccgtcggctttgattgcgccgatcacattcttttctttttttcaatctccggacgactacagcacgaggtggatttctgccagttttttaagagtgctgagatttttcgcctttatgatcgcgattacgctgcccgctttttatatcgcgctgattgcgtttcattttgaagtcattcccaacgatctgattatcaccatgaaaaattcgattgttgatattccctttcccccgctgatagaagccatgattatggaaattacgattgaactgatccgcgaagccggtatcaggctgccgagaccgatcagtcagacgatcggcattgtcggcggtctcgtgatcggtgacgcagtcgttcaggcgggactcatttctaatatgatgattatcgtcgtagccgttacggctgtttcttcttttgtgcttccttcatatgaaatgagcacgtccatccgaacgctcagatttccgcttatgtttctggcatcctcgttcggttttatcggcatcgcactcggcttcgggcttattctgatgaacctgtgcaagcttgaatcactcggcgttccttatttatcatcgttgacgccgtttcatttcagtgacttgaaggatgcatttatccggctgccggcttggtttattaaaagaaggcctttttatttgagaccgcaagactcaaagcagatgaaacatgttcgggggtggagaaaagatgaagcctaaaaaaatcagccggcttcaaggcgtgtttttcattaatcagacgcagatcagcatcggcattttggcgctgccccatttactgatgatgaaatcgggaagcagcggatggatttccattctgcttaccggattgctcgtccagcttacattcagcctgtatatgatattatttcaccggtttccgaagctgaacctgtacgaaatgctggaggaggtgttcggaacacttgccggcaaaggggtgcaggtgctgtatattttatacttcgcgtttctctgcacgctcattctttctgtatttacacggatattggatatctgggtgctccctcagactccgaattgggtgatcagcttaatgctgatcctcggttctgtctatatcgcccaggctccgctgaatgcgatcgccaggttcagctttattttaacgccgtttttgctgctgatctctctgccgcttttatacacgctgggaaaagccgatatcacatacattatgccgatttttcacggaaccgcaaaagacatgcttaccggggtgcagcaaacacttgtcagcattaccggctttcaggcggcgctcgtgatcgggcccctaatcaactgcaccgtcagccagcgctacaaaatactgacgatttcaaacatcttgattatcctttattacctgtatatcacccttacttgctttgtcacaatcagccccgaagaaataaaaatgatcccggagcctgtgctgtacctgttaaaaaccgtttcattcagaattatcgaacggacggatctgctctttttgacgttttggttcgtgaccgtcttttcaacgctggccaacgtgttttacttggcaagcaccggcattgccaagctgttcaatcaaaaagatcacagccggtttgtttatccgctggccctgctcgtcttccttctgtctatttgggccacaagcacagataaaacgatacagcagctggatcagtttttccgcatttccgatattgtgtttgtgtatttgtttccgttgtttatggtattgattgtccttgtacgcaaaaagggtgtccgccatgcgcattaaaaaagcggttcttatcagtctcatgtgcgcaagcctgacacttgcgggctgctgggatcaaaatttgctgaaagatatttctctcgtgctgaccgcaagccttgatgttgatcatgacggtaaaaataaaatcggcatcacctatcggaaggttcagtcctcccaggcggaacaggaaacgggcggctcattcattacgacggtgctcagcgcttccgggcacaccatccgtgaagcgcggtttcaattggataagcttgtcgaccagcgcattgacacgtccaagcaaagagtcttattaatcggtgagaaaatggcggaaaaaccgctttttccttatctcgatgtcttttacagagatccgaaaagcccgcttctcgctcatccggcggttgtaaaagacggcgaggcgattgaagtgctgaagctgatcgtccggcagaaattgatcgtcagcaagtatttaacgaatttattaacaagcgctaatgcggaatcaaatatcagcatggaaaatttgcaatccatccgttcaagcatgctgacggctgataaggatttcgcccttccttatttatcgattaacggacagacgataaaggtagagggttctgccctgttcagcggccagcgaaaagtgactgaggtgctcggtcaggattcgaccctcctgacccttttaagcgggcaatttaataaatcggctaatattaatctgaagctgtgggacaaatacaaaatggatattgaaaattatctttctctcggcatcacggatgccacgcgaaagattgtatttatagatacagatccgcagcatataaaagtgaaaatccgtttaaaactgaatgcacgcgtcttggaatatccaaaggacaagctgaattcttatacggcaatcgaccaaataaacaaacaagcctcagcaaatttgaacagccaggccagatcggtgatcagccatattcaggagcacaactcggatatcctcggcatcggccggaaatatcaaacccattattatgagcggggcaagcggctcaattggcgtggggtctatccttccatcgagataatccctgatattaaagtgaatatctcacaaatcggcatcgtgaactaaaagagaccccggtctctttttttgttgccaaccgaattgattcgtgttactctttttatgtaaacggttacatagttgaaggaggagtgtttgttggcaacgattaaagatgtcgcaggcgctgccggcgtctctgttgccacggtttcacgtgtcctcaatgacaacggctacgtgcatgaagatacacgaacgaaggtcatgcttgccatggagaagctgaattattatccgaatgaagttgcccgctctctttataaaagagaatccagactggtcgggctcttgcttccggatattacgaatccctttttccctcagcttgcccgcggcgctgaagacgagttgcagcgggaaggataccggctgatcatcggcaacagcgatgaagaattggaaaaagaactcgactacctgcaaacatttaaacaaaatcaagttgccggtattttggcggccacccattaccccgaccttcccgaatacagcggcagcctttacccggtcgtatttctggaccggacaaaagaaggcgccccatccgtattcagtgacgggcgggcaggcggaaaacgggcggctgaggaaatgcttcgcggcaaaagcacaagcatcacgcttgtcaaaggcccagcccaccttccgaccgctcaggaacgttttaacggcgcacttaacgtgctgcaaaaagcgaacgcgcagttcaatgtcatctccgccgcttcattttccatcaaggatgccgccattttagcagaagaattgtttgcagcataccctgaaaccgacggagtcattgccagcaacgacattgcggcggctgccgtcctccatgaggcactgcggctcggcaaaaaagttccggaggagattcagatcatcggatacgacgatattccgcagagcaggcttttgtttccgccgctttcaaccatccgccagcctgcatatgagatgggaaaacaagcggcaaacctgctgctgcaattgataaagaaagagccaccgaaagagacggccattcaaatgcccgtgacttacataagaagacaaacgacaagaaaggatgatcaccatgagtgaaatttgtgttatcggaagctgttctatggatctggtcgtcacatctgaacggcgtccgaaagccggagaaaccgtactgggcacagactttcaaaccgtgcccggaggaaaaggcgcaaatcaggccgtagccgcttcccgcctgggcgcaaacgtatatatggtaggaaaagcaggcaatgacagctacggaaaagcgattattgaaaacctgaaggcaaacggtgtcaatacggactatatggaaacggttacacataaaaaaagcggaacggctcatattgtgctcgctgaaggagacaacagcatcgtcgtcgtaaaaggcgcaaacgatgacatctcccccgattatgccaaaagtgcgctggcaaaacttcccggcattgatatcgtgctgatccagcaggagattcctgaagaaaccgttgaagaagtgtgcagctactgccgcgcgcagcaaattccggttatcctgaatcccgcgccggcccggccgctgaaacaatcgacgattgaggatgccgcatatcttacgccgaacgaacatgaagcatccattttatttcctgaccggacgaaagaagaagcgctcgccggctatcccggcaaactgttcattaccgaaggaaaacaaggcgtgcgctactcagacggcaccgcggaacggcttgttcccgccttccctgcagaagcggtcgacacgacgggagccggcgatacctttaacgcggcacttgccgtcgcactcgcggaaggacgggacattgagcaagcgctcctgtttgccaaccgcgccgcctccctgtccgtgcagcacttcggcgcccaaggcggcatgccggccagaaaagaagttgaggagctgctgtcatgaaaaaacacggaatgttaaacagccacattgccaaagtattagctgatctcgggcatacagacctcatcgcaatcgccgatgcgggtctccccgtccctgacggcgtccctaaaattgatttgtccttaacggcgggcgttcccgcctttcgggacgtgaccagcctggtagccggggagatggcagtcgaaaaggtgatcgccgcttccgagatcaaagacgcaaatcctgagaatgcaagtttcatagaaagccatttctcagcgcagacgatcgagtacatgtcccatgaggaattcaaacggctcacacagaaagcaaaagccgtcatccgaacgggtgaaatgacaccatacgccaactgcatcctgcaggcgggtgtgattttctagaaagaagggatccagcatgcacatcggcatgacagacattcataaagcattcggcaaaaaccaagtgctctccggcgtctcatttgagcttctgccgggagaaatccacgctttaatgggagaaaacggagcgggcaaatcgacgttaatgaatctgctcaccgggctctaccggctcgacaagggaaacattacgataaacggaacaaatatgagcttctccaatccaaaggaagccgaaaagcacggaatcgcctttatccatcaggaactgaatatatggccggacatgacggtgcttgaaaacctttttatcggcaaagagctgacgacggcgttcggcgttttggaaacgaagaaaatgaaagcgctagcagaatcacagcttgaaaaactgggagtctctcttcctcttgaccgggaagccggacaatgttccgtcggacagcagcagatgattgagattgccaaagtgctgatgacaaacgccgaagtcattattatggacgaaccgaccgcggcgctgaccgaacgggaaatcagcaaactgtttgacgtgatgacggcgttaaagcgggacggcgtatccatcgtctatatttcgcaccgaatggaagagatattttcgatttgcgaccggatcaccattatgcgggacggcctcactgtcgatacggcgcatattaaagacactaattttgatgaagtggtcaaaaaaatggtcgggcgggagctgaccgatcggtatccgactcgcacgccgtcactcggcgataaggtgctcgaagtgaaaaacgcctcaaaaaaaggaagcttttcacagatcagtttccatgtgagcgccggagaaatcctcggcgtttccggcttaatgggtgccggacggacagaaatcatgagggcgctgttcggaattgacaggctcgattccggagagatctggatttccggccgaaaaaccggcattcggggtccgtacgatgccatccgtaagggactcggcctgattacggagaaccgaaaagatgaagggctgctgctggatacgtccattcgtgaaaatatctcattgccgaacctgaccagcttctctccgaaaggcatcattgaccgaaaacgcgaggcggagttcgttgagctgctcatcaagcgtctgaccattaagaccgcatctccggaaaccgccgcccggcatttatcaggaggaaatcagcaaaaagtcgtcatcgccaaatggatcggaatcggcccgaaagttctcatccttgatgaaccgacaagaggcgtcgacgtaggcgcgaaaagggaaatctattcattaatgaatgaactgaccgatcgcggagtcgccatcatcatggtgtcttccgagctgccggaagttctcggcatgagtgacagaatcatcgtcgtccacgaagggcgcatcagcggagaaatcaatgcggccggcgcaacacaagaacacatcatgacacttgccacgggagggcagcagtatgaaaactgaaccaatgacatcaactgaacaaaagcgattttccattcacaccttcacacaaaaactcggtccgtttctcggcttactgattcttgtgctgatcgtttccgttttaaacccgagttttcttgaacccctcaatattctcaaccttcttcggcaggttgcgattaacgctctgattgcattcggaatgacgtttgtcattttaacgggaggcattgatctctctgtcggagccatcctcgccttatcgagcgcattggtcgcaggtatgatggtctcaggcatcgacccgatcttagccgtcatcatcggctgcgtaatcggcgccgtactcggcatgataaacggattattaatcacaaaaggaaaaatggcgccgttcatcgctactttggcgacaatgaccgtctttcgcggactgaccctcgtctatacggacggaaatccgattacgggactcggttcaagttacgcatttcaattattcgggcgcggttattttctcggcattcccgtacctgccattacgatgctgattgcatttgcaaccctgtgggttcttctgcacaaaacaccgttcggccgccggacataagccatcggcggcaatgagaaagcggcgctgatatcgggaatcaaagtgccccgcatcaagatcatgatctattctctgacaggtttattatcggcgctggcgggagcgattctgacatcacgcttaaattccgcacagccgacggccggggaatcatacgagctggacgccatcgcagcggtcgttctcggcggaacgagcctgtccggcggtcgagggcgcatcatcggtacactgatcggggttttgattatcggtacgctgaacaacggcttgaaccttctcggcgtatcatctttttatcagctcgtcgtcaaaggaatcgtcattttaatcgcggtgctgctggaccgcaaaaaatcggcatagtaggaggaccattatgaagaaagccatcatcacgatcgcggcattatcactgtttttgctgtccgcctgttcacttgaaccgccacaatgggcaaaaccgtcaaacacaaaacataaaaaagaattcactatcgggctctccgtctccacattgaacaatccgttcttcgtttcattaaaagaaggcgttgtaaaggaagccaaaaaacggggcatgaaggtcattattgtcgatgctcaaaatgattcatctaaacagtcaaatgacgtagaagatttgatccagcagggagtcgatgcgctgctgatcaacccgaccgattcatcagcgatttcaacagccgtcgaatcggcaaattccctcggcattcccgtcattgcgcttgatcgttcagccgaacacggcaaagtcgaaacgcttgtcgcctctgacaatgtcaaaggaggagaaatggcggctgactacctcgccgatcagctcggaaaaggcgccaaagtagcggaattgcaaggggtgccgggcgcatccgcaacacgggaacgcggaacgggctttcatcatattgccgacaaaaagctggatgtcgtaacaaagcaagcggcggattttgaccgtacaaaaggattgaccgtcatggaaaacctgctgcagggacatccggatattaaagccgtgttcgcccataatgatgaaatggcactcggcgcgctcgaagcgattaacagctcaggcaaacacattctggtcgtcggtttcgacggaaataaagatgcgatttcttccattaaaaacggaaagctgacagccacggtcgcccagcagccggagctgatcggaaaactggcggccgaagcggcggagcaggtgctcaaaggagaaaaagtcaaaaaaaccatttccgctccattgaaacttcaaacacaaaaataaccggccgatgtttagacttccggtaaaacgtgaaaggatgaagtaaaaggagagatacagatgaagaaaacagccaaagcggcatccattctgacccttgcagcgggaataacagcggcttcagctgccggaataacgcctcttccggagacacacgcgcaagaagcggtcaaaattgacgatctgtacagctacccgcttgactcttatctcgtttccgcggaagcattgaacgtcagaacaaaagcatcagcagccagtccgagagctgatacccttcatttaggcgacagcttaaagatggtttcattccagaacgctgactgggcaaaagtacattataaaaacggaaaaacaggatttgtatctactcattatattgttaaagaagcaacaaccgtaaaaacgacggcaaaaacaaaagtatatacagacaaacaagcggtcaaagcttcccttgctaaaaacacgagcatttctttcctcggatggaaaaagacagccggcggcggcattgacttcggctgggcgcttgtcgattacgggggcgcaacgggatatatcagcacaaaagatctgcaaaaactgacataatagcaaaacggatttcgcaaattcagcgcgaaatccgttttttctttcttgggcagtcagaaacgtctaaggttcgaaatatttctcaggaaatattgtcggatgaagatgaatgcatacgactctaaaatggcttctttatgtaatccgccaggcgttttgcattgtcacgaatagccgcagcatcggcgctgcttaccccgtacatagcgaaagccggcaaataggtcatacccgtaaaattagccattgcctgaaacggccttaagagctcgctcagtgaaaaatggttggacccgcctgcctgatatgcatcctctccggcacctacagaaacagccagcagcaattctttgccgtgcagcgcctttcctttggaaccgtaagcccagccatacgccagcacatgatccatccatgtttttaaaagcggaggcgcactgtaccagtacagcgggaattgaaatacgatccggtcatactgttcacacagctgccgttccttttccgcatctattttcccgtccggatattctttataaagctcacggaccgtgatgtcatcatgattttttaattcttctgtccacgccttattgaccgctgagttgttcatgtcaggatgaaccgctaataccaatactttcacagctaccacacctttcccttttgactgtattttacctaatctttgccggttcagccaaataaaaagaaagcccccgagaaaaatggagctttcttttttaatttattccgggcttccttcggttgtttcgatatccttcgcaaaattcggattatctaaatttgcgttgaaaaagtccgccgtattcggaagcttgaggttcatattcattttttgagaaatggtcactttacaatctttaatgacatagtcaaacacgtgtccgccggaattgcgtccttcatcaatgaagtgcaggtgatatccggaaacagcgatgccgtttgcgtaccccggcgtccagaagccggcgattgtaccctgaatgtcgtcaaagttgaacacaggctgtgttttcaccgcttcgatcatcggaacgtacggtttctcctggcgttctaccgttcttgtctgcacctttttaaatacgccgtctaaacggatcgcataaaataagtttttactaggcagaaggctggcgatttcctgctcgaattcttcacgggtcatttcgccgtcgatcgtatgcgtcatatcaggcgtgaaaaatgtgaatgagcagaatggtgacaggtctccgcctttaacaggcgtagccgttccgtcgccgcgcagacggtaaaattctccgtcaaatccgattaattcgccgtccaatttgttgaacgtgccgattccgaaatcaccgaacttcggaatgtcagccatatcaaaatctccgtcatatactccgtccagcagagatgtcattgttgatacttgatagatctgatcctcaggtgagcctttttctccgcggctcatcatatggatgtcgcttgcgtttttcatattcccttcactccttttaaattgggctgttttagaaaacaggtcatggtgcgcagagtgctagagagcttttgctttcattttttctttgaattgcttcggaagcatgtcgcttgataaatggacattgtcactgtaatcgacaggaatgtcaatgatgacagggccttctgtgttcaagcctttttgcagcacgtctgccagctgttccggtgactcaacgcgcaagccggtggcgccgaagctttctgcatattttacgatgtcaatgtttccgaaatctacgcatgatgtacggttatattttttcatttgctggaatgcgaccatatcatatgtgctgtcattccatacaaggtgaacgatcggcgcttttaagcggactgccgtttccaattccattgcagagaacaggaatcctccgtctcctgaaacggatacgactttttcacccggattcaccaatgtggcggcaatcgcccaaggaagcgctacgcccaatgtctgcatgccgttgctgatcaacagtttcagcggctcataagcgcggaagtagcgggacatccagatcgcgtgagaaccgatatcgcaagtgacggttacgtcgtcatcaattgcattgcgcagttcttggacgatttgcagaggatgcactctgtcggatttatggtcgcttggcgccttctcgctgtctgtgagcatctgttttaattcgctcagcacttcttgttcacggctgcccatatcaaatgtcacagcgtcgtgttcaatttgtttaaccgtagcggagatatcgcctaataattctaattccggctgataggcatgatcgatatcggcctggatttcgtcaagatggataatagcacggtcaccgtttacgttccagaacttcggatcgtattcaatcggatcataaccgatcgttactacgacatccgcctgttcaagcagaagatcgcccggctggttgcggaacagtccgatccggccgaaatattggtcttccagctctctggacaatgtgccggccccttggtacgtttctacgaaaggcagttttgttttggcaagcagtttgcggatttgttttaccgcctccggtcttccgcctttcatgccgactaacagaacgggaagttttgccgtctggattttcgcgatagccgcgctgaccgcttcttccggtgcagggccttgtttcggcgccggcacgctgcgtacgtttttcacatttgtgatttcattcacaacatcctgcggaaagctcacgaaagccgcgcctgcctgacctgctgacgctgccctgaaggcgtttgttaccgcttctggtatattccctgtttcctgtacttctacactgtattttgtaatcggctgaaatagcgccgcattgtccaatgattggtgtgtccgttttaaacggtctgcgcgaattacgttacccgccagcgccactaccggatcaccttctgtattagccgttaacaagccggtcgccaagttggatgcccccgggcctgaagtaacgagacaaacgcctggttttccagtcagtcttccgacagccgcagccataaatgcagcgttctgttcgtgacggcataaaaccagttcaggtcctttatcttttaacgcatcaaatactgcatcaatttttgcacccggaatgccaaaaacatgtgtgacaccttgctccactaagcaatcaacaacaagctccgccccccgattttttccagaggtttttagttcatttgttgcttttgccaacaccctcactccttattatgcatattaaatataaaattttaagtaatttgtgatattattcactatacactctttggaaattgacctccaatatcaattcgccgtatgattaatatgtttcacgaataattaacaaagagaaaggaatggataaggatggagcttcgccatcttcaatactttattgccgttgccgaagaacttcatttcggcaaagctgcgcttcggttaaatatgacacagccgcctctcagccagcagatcaaacagcttgagaaggaagtcggcgtgaccttattaaagcgcacgaaacgggttgtagagctttcagctgccggagaaagttttttaaaacacagcagaaacgcgatcgaagaaatagacaaagcgattgaaatggcgcagagaacggcgcggggagagctcggccgccttgtcgtcggttttgtcggctcggccacatatgaatttctgccgccgatcattcgggaattccgcgaaaaattcccctccgtcaagcttgatctgcgtgaaatttcttctttcagacagcaggaagaacttctgaaggggaacattgatatcggcatccttcatccgcctttacagcattccgcgttacatatggaaaaggtgcagagcagcccgtgcattctggctttgccgaagcagcacccgcttaccgctaaacagacaatcgacattcaggatttaaaaaatgaaccgattatcacactgtcgaaagaaacatggccgactttatacctagagtttgtaaactactgcgagcaggcgggcttcaaaccgaaaatcgttcaggaagcgacggagtatcaaatggtgatcggattggttagtgccggcatcggtgtgaccttcgtgccttcttctgctaaaaagctgtttaatctcgaagtcgcctaccgcggcattaatcaggtgcagctcactgccgagtgggtcattgcctaccgcaaggataatcaaaatccgattctgaaacattttctggctattatgaataaacgccaggctttattgcaggcggataaggaaaatgcataaaaaagagggccgccgaaagcagcctcttttttttgtgcttttatggatttttactaaattggtagaaacgctcagtacaccttacgacctgtacccgtatacatacagtacaactgatcaggagggataaaaataacggggcggcaatgacccatctaaaaggaggcagaacacattacacatattaccgtcattttgaccctgatttctttctttgtgaccattatttttatattttggagacccgggggattaaatgaagccgttccggcgtcgctgggcgccattctcgttttgttatgcggaaccgtttcctttcatgatttgggggatatagggtcaaaagtcaccggagcatcaatcaccattatctccacaatgattatggcgatcgcgctggaaagcttcggtttttttaactgggcggcggccaaactgcttcaccgcgccaagggatcgggcatccggcttttttggctgaccaacctgctctgtttttcaatgacgctttttctgaataatgacggcagcgtcttaatcaccactcctattttactattggtcttacaatatctcggacttaaaagacatcagaaaacaccgtatttaataagcggcgtattaattgcgacagccgcaagcaccccgatcggcgtcagtaatatcgtcaatttaatttctctcaaaatgataggcatggacctttatttgtacaccaatatgatgtttatccccggcacgctgggactggtgtttatggcctttctgctgtttgccgttttttaccgccgtttgccgaaacagctccccgatattccggttcattttgactcgctggaacacaaacgatatcatccgcttcagcctccgccggacccgacccaaaacagccgtacgaacatcatgttttgtgttttggcatttgtattgttcgtccggatcagtctgtttgcagcttcttacaacggcatatccgtttcgctcgtggctgtcatcagttcagtcatcctgcttggctggagatggatttatttaaaaatcggaccggcagacttattaaggaaagcgccttggcatatctttatttttgccttcacgatgtacattatcatctacggactgcataatatcggactgacggcgctgcttgttcagtctattgagccttatgtctcacaaagcattgcccacgccgcatctattatgggcattgctacatccgtcctctctaatttgttcaataaccatcccgccttaatgatcagcactttgacattaactgaaatgtccatcgacccattaaccgtaaaaatcatttatttggctaatattatcggcagtgatatcggatcattgcttctgccgatcgggacattagccacgctgatctggatgcatatcatcagacagcacggcgaaaaagtttcttggtcagaatatatcaaaacgaccattatcgttgtccctctcaccgtcgtgtttaccattaccgttttatatgtttggatcagttggatttacctttagctcccatgaaaaaaactgcctgctgtataagagaggcagttttatcatttatggcaggtgcatggtttttaaatgattcaatttccaaaaaacagtatcgccgtctgcattggtcaattcaagaatattatctgagacatcctgcaacagcccgactttattcggtatatctcctaaatccagaataatcagcttcccgatatatctttttaattgctcctcaaaattccggacaaggggcacattagcgggaacaaccggaagctctgaactgtttaatgtatacggcgtctgctcatcggaatagggtgtcagccatttcaaatgatgcatcgagatgaaaagagtcttataaaccggagagaagaaaacaaaataatcatttaaaacacttgtcacatacccatgaatggaacggtctcccgtaacaaatatttctgtgaatctgccttttatatgctggagggtattccggtaagaaaaggaatgttcctgtttttcgggatgcggacttttttttcttgcgtacggttctttattctcttcgtccgggagcgtcaatgtcatcctctgaaggtgcagcagcggaatataaagaaacgtccggccgtcatgaatcacaatgatatcctgaccgatatccaaaagagttcctgaaaatgtcgtattccccgatatctcaatatcgacttgtttatccagaaatctgcttaatccagccatttcattcccccctctcccgcgtttacggacaatctttccaatcatttacggccgtgtttccaccgataatctattgtccttaatacagtggcatagctataagagttctcttcctcccgttttgaggatcgaacggatcttgacgaccttttcgactttttagaggaagtacgctgctcttcgcgtgattcttcttcatgcggcttttcttcttcggcgctctctttctcacctttattctcgtcgtctttattctcctcttttttagctgctccttttgccccttcgctgatgctcttgatatgaaaaggatagatccgcagcacttctttatctttcacaagagtgtagtggccgtcggaattatccacaagtataccttcaacggcttcaggacctccgcggttgatggatacccatttgtggatcaggcgtttaaatatgccgtgaaaatcatcagccatttcaaattccgggcgctcctcctcttggccgtcctcttcttgttccgcgctgatgcttttgacatgatcggcgttaaaatatacgattccgtcatcttccgtttccagcacgagaaaatcatcccctgtttcgtgaagctttcctcttttcgattccggacctccctgattcaattgcaccgtgcgattggtcatccggctgatcagatcttgaaaatcatcagctttttcacattctgccgcttcggccggcgatacggtttcactcgtattttccgtcacacttttcacgtgtttccattgataataaacgattttattatcaacctgaagagcgatataatccgattgaatgtctgctaatctccctgtcttggactccgggcctccccggtagacagtaatcacttttccttccattgcatgcaaaaagttgtcatcagaccgctgccgcttcgtattgcgtttcatctattgtcctcctagtcatttttctcataatgtaaaaagcataatgcatatatacgtatcacgattattttcgggaactgattcaccagcctatttgtaaaaaatctttcttcatttccaaatcagatattccaccgctctaactcactgctgatgaaggctgaccgctccttaatgtattcgcaaatcacttcaggctcccggtcaaagcaatcaatctcttctttcttatatggatccttcgcgacatgcggcctgatctgctcatacagtgacatgaccttcggcttcatatgttcaatagtaaaccgggtctgaagcgtctcttccaaaagccgtttgtacgctttgcggaaatacggttcatccagaagccttgcagtcaaggtattaaacccttgtattctgacataatcggcctccatccgatcaccgtgaatgtctcttccccacgtcgcatcgtaatcccacggaatgacttcaaaaagtcccgtttcatgattccggtacaaagcgtaattatgaacaaatccatcgtagtttgaggtaaacacgatgcccgcaagccaccgcaaatacttatcggcgtccaagtgtttgacgatctcccccttgaactctgacttcggaacggtattaattttatagatcatatcctgcaagtataaatcgtcttctttcgttcccgttttcttttcataaccaagttcgagcgatgttttcgtatcccgctccagatcactgacgagggagaaattggcgtcgtcatcaaccgcgtaaaaaacagccccgtccgccaaattccgtttcgccagaaaatattcatccactgactccagctcaagatacaccccctcatgtctgccattgatttgcagggttacgaaattcgcctttggtgacagcgtcccaagctccgcgaagaaatcgagagacagcttattccgcatcatcgacggatctttgtattcagcgtttaaatgtatctctttcgccctgcgaaatgttttcggcgaataaaaagcgatgtgatacgattttttcttgaaatctcttatatgcgagccgcggtacgccagatcaatgtcaagccgtttttgattcactctcagcaccgcgggcaccggatcatcatcccaaatgtcttttttcagctccattaagtctttcgggtgaataaacagctggtatagaggcaatgttgattggtctttcatcagtaaacctccctgtattaatttaggctgtgctttttatataaaactcagcgaatcacacatacacttttttcattcatgcgtactatgtggtagtaaggatcgcatcctaaaaacatatatcatgaggaggtttcaaaatgggccactattcccattctgatatcgaagaagcagtaaaatccgcaagcaccgagggattggaagattatttgtaccaagaaccaaaaagcagtaagaagagaaaatctcgcagccgtaaaaaatcatgccgctctcacaaaaaatctcgcagtcataaaaaatcgtgccgctctcacaaaaaatctcgcagtcataaaaaatcgtgccgctctcacaaaagatctcgcagccataaaaaatcccgttctcacaaaaaatctcgcagccataaaaagtcccgttctcacaaaaaatctcgcagccataaaaaatcccgttctcacaaaaaatctcgcagccataaaaaatcccgctctcacaaaaaatctcgcagccgtaaaaaatcatgtcggtctcacaaaaaatctcgcagccacaaaaaatcatgccgccgcaagaaaaaacgcacgcagaaaaaaacttatcgtcctcataaaaaagacccttgcaaaaaagacgattactgcagcaaaacagagtactggaaagacgggaacatctgggttgtaaagaaaaactacaagtaacaccattcgtaaataggctgccggctaaacggaagcctttttcctcaatcagatatatgccacgtgataagatatgcagccggttttcttttgttgtgtttccgaattttctttctgtataatcaggtcatacgataaagaaaggcggccgaaatcatgcatatcttacgagcagacgaactgaacgcaaaagacacttacaaattgctttcgggcacagttgttccccggccgatcgcatttgtcactacgcggtcatccatcaacggcgccgtaaacgcggcgcccttcagtttctataacgttgtctccgcagaaccgccgcttctggccatctcagtcagccgcgcggacggtcggcagaaagacaccgcgagaaacgcaatcgctcatcgggaattcgtggtgcacgtcagtgatgagtccattattgaagacattaacaaaacggcggcaaggcttgatcctgatgtcagtgaacttggcatgacagacttttctgtgacagacagcgcttgcatcagcgttcccggtataaaagaagcaaaagtgaggtttgaatgtatactcgaacgccatcttccgttccaaaatgacagcggagaaacgacgacagacctcatcatcggcagagtcgtttgttttcatttgaatgaccaagtatatgacgccgataaaggctacatacggacagatgagctgaagcctgcggcaaggctcgcggggaacgaatacgccagactcgggaagacatatacacttgtacgcccgacctgaagcaggaaccattataatagaagaaactagtcaaaaagacccctttcgtaaggggtcttttttgagtcttttaccatgtaactcagcctaacgtcttatagaatgccgaaacttacaaggccctcacccgtatgaaacgagtgacacatttttaggaggcagacgatggatttcattcagttactggttttttcagccgtatttattttgctcagccttatgtttcaagtatttgccgtcaaagttctcaatttgccaaagcctgttaaaaagcagaagccgataaacggcacacatcgattaatcgaaatcacactgcttattacgggcatcgcagcggtgacttttttcaatgaaatgtacgtatttgcgggagttgttttcatgctatttttctgcagcggcttaatggaatggcggcaccggcgggaggaaaagcaaaatgtgtacgattctttttacgcgggtctttctgccgcgcttggcgtgcttatttttttcatcagtcagcgtagctctatactcctgcggccgctccgtcgccgcgcgggtcggccccgccttggagaaagccttcttcatcaatgacgatcgctgccgcatggcccataagcccgtcaaaatcaccaacggtctcgacgcggtggccgctctgccttagggcttctctcgtttcagggctgattctgctttcaaccctcagcccttcatactcctctccccatgtccgtccccagacccagcgcggctcattgatcgcctgctgggggtccattttgtaatcaatgatgcgcgtaatcatcgctgtctgagtttgcgactggccttctcctccctgggttccgtacaggatgtgaggctttccttctttacaggtcatcgccggcatgagggtgtggaacgtccgcttgcagggttcaagtgtattgacatgggatccgtccagcgaaaaaaatgacccgcggttttgcagcagaatgcccgtctcccccgctgtaacggcagatccgaactcgaaatagaggctctgaataaaggaaacggcatttccttccgcatcggcgacggcggcataagctgtgtcgcttccgaccggccggcttaccgccggcgcagccacgttaccgatttcttccgcgagctgctttgcataccgtttatcaagcagccgatccagcggaatatgagaaaatgccggatcagtcagcacttcattccggtgctgaaaactcttcttcagcgcctcgatcagcagatgataatagtcaaaggaaccgtgttcaatctgagaaaaatcatagttttccaatatattgagcgtcattaagcctgtaaaaccctgtgaattcggcggagcctgatagattttgcacccgcggtaatcggaggataccgggttcctccactcgccgcggtgggctttaaagtcatcaagtgtcagacggctgccgttgttttgcagaaaggatgtgatgcgttgagcgaggtctccttcataaaaagcgcttctgcctttctgggcaagctgctccaagctggccgccagatccttttggacaaaccgttcaccgggcatgggcgcttttttgtttctcgtaaaaattgccgaggtgtaaggcatcgaggctaaaagagcgagattacgttctgtgtgggcgcactggtcggcggacaccggaaatccgtttgccgcataatcaagagctggcttcagcacctcagcgagcgaaagacgcccgtacgccgaaagcacggcatcccagctgtccgccattcccggaacggtaatggcgctttctgtcccgcgcagagggatcgcttctctgccccgatacaagtctctcgtcacatgcttccctgaacggccgctcccgttataagctttgattcgtcccgtttctttatggtaagtgagccaaaatgaatccccgccaagacccgtcatatgcggatacacgactgccagacaggcgctgaccgccactgccgcgtcaaacgcgtttccgccctttttcagaatgccggcccccgcctgagaagcgagataatgcggactgacgaccatttgtttcgttccgatggttgaagtattcatggcaagcccctttacaaattttctcaattataaaaagcggcttcgcggccatccacattcctgaaagaaaatctcacacactatttacttttcgataataaattaccctaagttattacgtatcgaaaataataaaaaatttctcccttcataccgtaacgtttcatgatacaataatgtctaccaaatgaaggaaggtgaagcggattggaacatgaatacagcataccgaatcttgtccttgatgaaacggataaacagattctttcgattttgcacgaggaagggaggatttcctatacagacgtaggaaagcgggttaacctgtcgcgagtggcggttcagcaccgcattcagcatttactggatgccggtgtgattgaaaaattcaccgctgtcatcaacccggcgaaaataggccgccatgtgtccgtgttttttaatgtggaggtggagccgcagtatttggaggaaaccgcattaaagcttgaaaaggaaccggccgtgacaagcctttatcatatgaccggaccgagcaagctgcatatgcacggcattttcgcaaatgatcagaagatggaagagtttttgacaaaacggctctatacgcaaaaaggcgtcgtcagcgtcgactgccaaatgctgattaaacggtataaaagcagaacgggcatgaagctgtaaggaggacatagccatgaaacatccctattgggacattacggcggcgatggtccgaacgggcattctcggattcgggggcggcccgtcggtgatcccgctcatccgccatgaagccgtcaataaatacaaatggatagatgatgatgaattcggagaaatattagcgatcgctaatgcacttcccggaccgattgccacaaaaatggctgcgtatctgggcttcaagctgaaaggcacgttaggcgcaatcgtggcaacccttgcacatattctgcctacatgtctcgctatggcgggcttatttgcggctgtcaatgtcttaagccactcagcaattgttgccggcatgattggcgccgtcacgccggttatcgctgtcatgctcggcattatggcgtacgagtttggccaaaaagcgcttaaaggtttcggctgggtcacgggcattctgttttttatcatcgcttttatcggcctgcaaacgctgcagatcaatcccggctttgtcattatcattttcttagcgtacggcgcgtttcattttaaattaaaggacaaaatcacaaataaacgttcaaaagataaaggaatgtcggcctcatgatcatgatttatgtatttatggcgttttttgtcgcaaacgtactcggatatggaggcggaccggcgtcgatcccgctgatgtttgaagaagtcgtcaacagatacagctggctttcaaacgatcaattctcaaatatgctcgcgcttgcgaacgcattgccgggcccgattgcaaccaaaatcgcggcgtatgtcggctacagcgcaggcggatggcccgggttcctgattgcgctgatcgccaccgtcgtaccgtcggcgctcgcattgatcgtcctcttgcgcatcattcagcgcttccgccaatctcccgtcatcaaaggtatgacgctgtccgtccagcctgtcatcgccgtcatgatgctcattcttacctggcaaatcggcgcagacggcatcaaagcgatcggctgggttcaagcgatagtgattgcggggatttccctccttgccttgacaaaattcaagatgcatccggccttcctgattatcgcggcgtttttgtatggaggtcttgtggttcctcatttataaagaaaagcacctggacaggtgctttttgtttcagtcccgatatgttgttcgatatagataactgtttcttcgtctatgcttcttacatgtggttcctgtcatccttgccagatggcctgatcaataaaaaacatttgcagcctcccggactgcaagtgttacacgtgatttttccgataaaacgttcgcaaaacatgcgtttcaaggtcagccagacggacagggatcggcagcctgctttctcgattgatcattttcattgtgatctgatagctgctttctaaatcaatatcatgtccgcaagacaagaagataggcttcacgtcccgccgtgtccgaagcgcccggccatatacctcgccgtcaatgagaatatcggtgtaggcgccgacttcattttcgggcatctcaaaatcgcagcctttgattttgagataggttttcgcaatcccaattgtaggcttacccagaaaaaaagccgcatgggtggcaacgcccatatgattgtaatgcagatacccgttgccatcaaacaaaaacacatccggctccgcctccagcttttcggccgcttgaatgatcagcggcagctcgcgaaacgcaagaaaaccggaaacatacggcacgctgattttccccatgctgtgcactttttcaatcacttcttttgtatcagcgtcaatcacgatgatactgcatacgccgtacggttccccgtcctgatcccaataagcgaggtcgacgcctgcgcaggtgttgacggagtctggatggatgacgggggataggttgattctatgtattagggattgctgtgtttgaacaaaatccgattcatcttttagatcaaaatcgtgaatttgatgtattttcattttacttgttttcctctcttaaaatagtcttcgctctcagtcgtcctgtgtgtcgatctagcgaagactccttcaacaaattatatcttttattaaaattcatttttcatttctttcataaaaataaggtccaattgtttaagtaattctttaagttcagtacacataatatcttctaaaggattttcccaatcttcgttttttatcagttcaatgccataactgccggttggatcgccttctgggtaccaccctacatcaagcagcaaatttttagttttatgagaaatctggaggaggtcttgattaaagtcaaataaccaagcatcatcattttcctctagagttttagggtcagtatcttttaatgtaatataatcaacagtccagcccgccggtatcttaagccttaagaaattgggaacatgttggcttagctgctgcaaaccctctaaaaccccacttcccacagtccagatttgatattctaactcttccaataattgttccatttcattaaaagagtcttctttataaatcttatcctttttcaagcccgctactatgagatggtattgatcattttgaaatattaccttaataacagcattacgtttttcattttgtagttttagcagttcatatttttcttccattcttttttctgaatttaaattgttctgtactacagaccagccattacagatttttaatggctgcaattgagaaatttgatctctgtccatcctgcttctccttgtattccacattgttatattatctataaaaaaacttgccgatgacaacacggcaagctcttaactatagcaattctaatacatcagtaaacaaggcatctcctaatgttattctctgggatgtatattcgcttttggaacatctaatttattatgttttcttaccatgagaacctctgttagtaactattcatttcctaatctttaattttaataaggttcaatctccttatcggtacaacccaaataaatatactaatcattcatagctttcgggggtataaaagcgactaattgaccttcaggatatatacctttccatccacaaggccatccgccggatttatatacttgaaacattttctcaaaaagattgtctttattaccgtttaccagacgattgattgcacatttatacagatctgactctacttcttcagcaatatcccaaaaatccataggaatgaaatcttcagaatagttatcatcagaattgaaaatattcgataattcttcatctattgtttttaagtgatcattatttaaaattatacccagcaactgtccggtttcatttgatttgacatcttgccaaattacttcaacttcatcagtatcttgagaccatgctaattgttgtgcaatctcaaaatcgtctgtaactgtaatatcagacaaattccgattattatttttaaataattctccatgcttaataaagtcaattacctcttccactaaatcgctatattcaccgaaactactcatttatttaaccacctttcccataattcctctgtagctcccccgcctctttgccagatagggagctttttgttttgaccttttttataaaactttcccatatttttgattttcgatttataaagaggtattcctttttctacccctaattttagtttttgctgtaattcataaacttgttgttctaaaacttcaacactttcattaatgtccattttattcaactgtttttttacaacattattataaacactatgataacctctatgtctagacaaagtacttattgcctctgcaggtattggtaagaaaataccattcgatgcatgatttgtttccattcctatttttttaattataggatggttatatagctctccaggaataatatgttgggcttggtatccagtccattttgatgaccgcggtaatcccatagattctaacaagtttttcccaagttcagttgaatcgctttttgttgtatgacccggtcgtcctggtattttcctcttctgctctatcatcggacccttagtgcctttaccactacccaccatcttcacaatcccaagatctttcacagctttggttttcacatcagcatgaatgattgggaaagttgcgccatccggtgtgacagtcttttggacacgaatttttacattcgtcggtactttgaattctttcagttggtctagaatctttttccctttttcaacttttgatgcttgtggcgattttgcaagcggtatgcctttgtttacatgcttcgccaatgcaccggctccaaccaaactcagcgcagcttccagtgccccttgcttccgcttctcctcggacactttgtttccgaacatatctctgcctgtgacggcttctgagaatccgtttgaggcgacaaggccgtatgcgcccatttctgtcattttgagaatgtctaaggattttccggttttataggcatctaaagcatgttctgcggcaatgacggtttttccggttttgtaaatggcttttccgcctttgaaagcgcggcccgcccagccgacgaccggtatgaatccggcggcggccatcgctcctgctgtgacgcgttctgcggtggagagcttttctccggtcaccggatcaacgccttcggctgctcttttataatcataatagccggtgacttcgccggtaaagttgcagatgccgtcccatgttttttcgtaccatggtttattggcttcttcttcagccttttcctgaagccgtcttgcttcggcctgctgggcttttgcgtcaatatagtccgttccctgtttttctgtcgccgtgacgcttttgtagatttcattgctgtggaaggcttttttgtcatagtacataggggatgcgcttttcccgttgctggtggcctgcatgagaacggaatatttgctgagcactgcgttgtccagagattctaagttttgatattcagcagtcagggattcatcaatcgtatcgactgccgtgatcgtgtcacgtctggttttctgggcatcgcccattttgtcagcgtaatcatccagcgtatatgtgtcgagatgaataatatcgctgatgcctgacaaaattgaatcgatttctgctttatgagcggagacaatctctgaagctttcaaatccgcgttgggcagctcatgctccaaaaatgaagtctccacatatgtatcgctgagttcttgatctttaatgtcacctgaaatgccatttaaaaacgcaatttgagcagagacaagcgtcagccagctgtcggcgatttccgcttgtccctgaaaaaaatcttttatattgtctgcgcctttccctttcaaagcatcacccagatcagccatgccttgaaaggcttgtttgagcgcacgcagctgctcttcaagggcttcgtattgtttctttctcttatctgcttcgtccgttaacgattgtgattcaaacactttgctcatcggcaagtcctttctttcgttattttacggcgatcgcctcgtcctgttctttcaaagaatctacgttgtctttaacgtccgcaatattcttatgaacggcctgcttgtattcgctgatcatcgatacaagctttgcctcgcgggattggtacttggaggtatagtcgagcttgttttttccgtttgaaccggcgttcccgatcgaaacggcctccaaagcgctgctgacggattcaagctgcttcatgacagctccgtatttgagttttatttctgccattaaaaccaactccagctttttttgattgattgtattttttctccgaccgtgtcaagggcttcttctcccagcgtcagcaggtgctctgcctctctcgcgatgcttctggcggcaaggagccctcctttttcaatttcaagctgtgtcatctttaagccgattcggtaaatataaccgtcgtatttgtctgtgacgattctgtatgcttctgtatgggcctgatcgcgccggtcatcaaattcttcagcaaaagtgccggtccaatgatgatccaggtgcggcctgaggatgtccctgatttcagatacgccctcttcctgcagaaattctatctctcttttcgcttcttttaatttatcaatttggtgttcaacctcgcccagtttatggctgatcgtgctgttaatatggcttaatgtgcttgaatggctcatctgttttcacctcgtcttacgcaaaaagtcgtacaaaaagcacagacttttccatactatatttccatatattatattttaaaatagacagaaagcagcttaaataggttaaatggcttattttcaacagccgagatgctcatcattaacgccaaaagactcacataaacggcatatccattcatcgatctcctctatgtatccatgataaattccctaaaaaaaaggagacagtgattaaccgtctcctttgccttgtatcatgatcatcatactgtcgttaactgcagtcccagttgtacaaaacgtttgagaaatcttttttcttcaaatcttccggtctgataaagaaattggcgattcccacatctccccacatcgaatcaatgtcatcatctgaatcaatttgcaaaagcagaatcgtatggttttgatgggagtaagaccgcggatcttcctgggtgaaggacgcatagccgccgattttatggccgaatgcgttcgccgtatattcgtcatacacctcatcgtcaaactgctcgaaatagtcaaaggcatccatcccggcatactgcctgaattgaaaatcagacgggagcacccattcagcagatagctcaggggtgatcagcgcttctgattgaatcggaaaatcgtactcctcttcaacctgaacgaaagaaaaatcatccatgagctccgcttcttctgctgtcacatgttcaaaatatttgacgcagaaacccgtttgcacgcacccgtcgtcaaaattcagaccgtatacgtcatcactgaccgatatgtaaaactgaagaatgccggtgtccggaaaatcagggagtccgggcatatccgcaaaattgatttgagcgagaagcttcatcggcctgccgctttcatctttaggatatggttcatgtttcggaaaataggggtctcctgcaattttactgtcataccgtcccgtttcagcttttttgacgtgcagtttgataaaaggccgtgctgacgtttccagcagatcgcgggatgattccatttgcttcggcagtttccatgttttttccacgattaatatccccttcgtctctaatgattgtatgataaaaggccggcgcggtccgccggcctttcaagtgacagaatcagtctgaggcacgacggctcttcttccgattgagatatattccacgcccgcctgttccgcttcctcaagcgagtggcagtttctcccgtcgaaaataaccggggtttccatcagctctttgtacgcttcaagcgggaagtgtttaatttgttcccaatctgtcagaatcaggacggcatccgctcccctgacggcttcttctatggactcccgataggaaacttcagccggaagcagcccggaagcccggaatgaagcgatcggatcgtacgctgtcatccgggcgtcaagagccgccagacgatccgcaatgacaatggacggggcatcccgcatatcatctgtattcggcttaaaagacagccctaataacgcgatggtcttccccgtcacaccaccgagcctgttcagcactttatcaaccagcatggactgctggttattgttgactttaatgacggacttcagcaattcaaaatcatgctccacatgtcccgcgatctgcacgagggcgtttgtatccttcggaaaacaggaaccgccgtaaccgatgccggctcttaagaattgattgccgatccgtttatccaatcccattccgtgtgcgactgattccacatccgcaccgactttttcacatatatgagaaatttcattaataaaactgatttttgccgctaaaaatgcgtttgacgcatatttgatcatctcagcgcttctgatgtccgtatgatataccggaatcgcaagcggcgcgaaaacccggtcaagcgtttcccgcgtctgccggtcttcagccccgatcacgatgcggtcgccgtgaaaggtatcgtgaatcgccgaaccttcacggagaaattccggattcgaggcgattgaaatgttcacgtccgctttcagccgtgaatgaataacttcgctgatcctgtcattcgttcccacgggaaccgtgctttttgtcacgacgatcgcatctttacagatatgttcggcaatccgttcggcgacattttcaatataagtaaggtttgcgtgcccgtcttctttttgcggcgttccgaccgctataaaaataaccttcgcttccgcaagccctttttcgtagctcgtttcgaatgccagtcgatgccggccgatatttcgtttcatcatatcttcaagacccggttcaaagataggggacaagccctttctcatctgctcaaccttacgttcgtcaatatctatgcatgttacgtcatggccgatttctgaaagagacactcctgtcacaagaccgacgtagcctgttccgatcactgttattttcatcgtgttcccccaaccgtttagaaattgctgctgggcagcttaccgttattatcatatgatcccggcgccggctgaatgccggaagcctgaggtcatgataggaaaaaacggcgccggccgctgataatagcataagcataaaagaatcatcttgcaaaacagccgcttacgcttcatttaaacgggatggagacgacgattaaaaaagaccccagcgcttacggcgggccacaggcagcggaggttccttataaacggctttgttttcagcgagaagcgccgcattttccgtgagcatgtaaatcagctccgcccctgcttcttttttcagaacgccgagcgcctcctgataataaaaatttctcgggccgagattatgggcgtcagatgcgagaaagtgaatcaaattcgcttccatcagctgcagcgaaaaggatttcgctttccgcccgaatgctccggcaatgcagccggccgtcacttgggcggccgcgcctttcttcacaagattgtatagaacggaagggttttcgcgaatttccctgttccgctccggatgggcgatgacggggacatatccgttcagctgcagttcataaaacagcctttcagcgtaggccgggacatgatccgccggaaattccgccagcacatactttgtattatggagcgggacaagcgagccgctttgaagacctgccagcagatctccgtctattctgatttcctggccgggcagaacagtcagcggaatgccttccttgttcaaacgtttgtttaacaggctgaccgcttcgttgaccgtatgccggtccgtgtcatagcggtatttcacatgatgcggcgtcgcgatgatcgtatcaatcccctgtctgaccgcttctctcgccatcttcaggctttctgtatcatccgccgcgccgtcgtctatggaaggaaggatgtgacaatggatatctatcatatttcaatccctccttaaaaagaatggaccgcgcccattatgacattattgtccgtaataggcgtagtccgaatgtttcgtttgtttcttcccgttcatcacggccccaaggagcttgcacgggcagtaatcgagcgcttcttttgccttggccgctttttccttgtccgttttcccgcttgagatcaccataatggccccgtcagtgtagctgcctaatattttcgtatcggctacggccaaaacgggaggcgtatccaaaatcaccttatcataaactgcgccggcttctgacagaagatctttcatggcacccgtcgataaaagctccgccggattcggcgggatcggcccgctcgttaaaatatccaggtttgcttcatcagccggcaggacggctttctgaaacggcatctgttttaacagcagcgacgttaatccggttccgttatccaatttgaaggtgaaatgaaccgtcggtttgcgcagatccgcatcaattaaaagcacttttttcccctgctgtgcaaatacgacggcaaggttggccgcggttgtcgattttccttcttccggaccggcggatgtgatcaaaagggacttcacctccgtatcaacggaagaaaattcaatgtttgtgcggatcgtgcgatattgttctgagttgatggatttcggctcagacatcgcaatcacgcttcgttttccgggtttgtcttttttacgcgtcaacatgtccgccccccgcttgtttggtttccgccatcctcaagtttttggcaacgctgtctttagtactgattgaagtaaccgttcccaggatcgggataccgagcagcgattccagctgttcttccgatttgatcgtattatccagatgttccagcaaaaaggcgagaccgattccgcccaaaagtccggcggcaaacgcaatcgcgatgttcagcttacggttaggctctgccggtgactggctgtccgccgcttcggcctttgaaaggatgctgacattatccacgttcataatggcggtgatcttgtcctgaaaaacggctgcaaccgcatttgccataacggccgcccgcttagcatccgtatcccgcacggcaatcgtcacgacttgtgaatcctgctcgctggacaccgtgattttcgattccagctctttcgaagtcatggacagatgcagctgtttaatcacctcatcgaggatgaccggacttttgatgatgacattatacgtgttgattaattggaggttggtttgaacatcattgaattggacttctttttgattgtttttggattggctgaccaaaatttgagttgagttttcatagaccggcgtaagagcgaagaaactgatgagtccgcctgcggcagttgccgccgcggtaataataagtataaacagcagacgctttctcagtattgcgaatatttcctttatgcttgtcgattctcccatataacctccatatcactttccgcgtattcccattccctccaatgatcttttccaattacgattatacagctttaaactgtcatttctaaccttttcaaatgacaaaattcgacaaaaatagacaatcacttcaatctgttttatttttgtaagcgctttaaatactggtgtcacaggaagattaaaaaatcccgcggccaagagcctgcgggattttatgttgcatatccatttttaatataagaaatcaaattctcaagcatttcttttgtggtcatctcagaggactgctcaccaatgtcgtgcgcatgcattaaaatcttcagaaactcctcttgatctaacttcgttttcttcatcattcgtttcctttcggcttccattaaattgaaaacaagattattatatgctgtcgggtgctgttttgcaatctctaatacatcattcgacacattcgggtttttatgtccttttttaggaaaaactttttccgggccatgtgttgcgatataatagaggaattggaatctttttattttgtgactcgttaggagcgataatcatgcttcaggatatgattgttaaagaagatgtgctcgcagcggctgaacagcttaaagaacttcttccttacaatgaagacaatgttcagctgatgaagaaagcactcattttatatcggcaggattccgtctatcgtatacaggttcaaaccccgacagagatttccgcatatgtgcaggatgttgtgcctgtaagggtcacgctgaacttatttttcatggtgaaaagcggctgcgcatgcccgtctgaggcgatctgccgccacgtgctggccgtttttctttacgtatatggccaattcgagcgggtcggtacctttaccgaacattggctggaaagagaaaagcttgaggaaagcagggagcttgtccgccggcagtttcaggaaaaagtgctgccgaatgaagagtcgctgtcaagctggctcgctttttttgattcggaattctcgctgtgggaggcgcggacgccggccggaagccagacgatgcagggcctttattacggctatctgtcagcgctcaaaaaacacgccccgaaaaaacccgagcttaaaagcttatatcagattcattcggcgcttgccgtctggcttcacatgttcactttgattgagtcaggcagattggatgccgaaaaagattattacagcatcaatccatacgtggaacagctgatggatacgatttattcctccattgacagactgaaaacgtacgctttgtctttttcactcgatccctttttagaccggacgcccccggtgcttcgcagactgcttgtgaaagaagagctttttcaatacgaacgcctccgggtattcggtgaaatgtggagcgcgcttttgaaccggccgaaatgggttgcgcgtgaacaggagattctcgcacaggaaagcgggcgccgtttttcgccggaagtgcggttcggacggcttcatctggcctttttgcaaaaagatgatgaagcggtcttccaagatatgtcccgcttccctcctgaagcgctgccgtatacctttcaatggctcggtgaactcaccgcgaaaaaagactggaaacggctgaaagcatggtatggccggatcgagccgcttgccgtgaactatacgaagcttgataagccgtttaaagaaatgcgcgacattatcggagagctgtttgcgctattggcggattatgcgcggcactcacgggatgatcagctgtttgaacggtttgcttccggctgccttccctatacctttagcgaatacagccagtacctgtatgaaaagcgacggtacgcggagtgggtggagattcacagcctcgtcggtttttccgtctgggaaatcgaaaaggacatcctgaaggaaattgccgccagtgatccggaagcgctcatcccctcctatcaccgggcggcggccttttttatcgaccaaaaaaaccgcagcgcctataaagaggctacgcgccatctgaaaaaactgcggacgctttataaaaaggcaaaaaaacagcaggtatgggagcggtatatcagccggctgagcgcaagctacaagaggctgcgcgcccttcaagaagaattgcagaaaggaaagttgattgatggcgagtcttaaggaaattttcattcatgtagaacaaatggaagattggacatttacgctgtcaagccatgatgagaaggagcagccgcttactctcagtcagatgaagactcatttgttccaatggcatgagtccaccttttacggaacgtttcttgaagacgtcagcttcatcggcaccccggccgttctgctcagcccgtggatgaccgtcgagctgctcggaaaaaactcgttcaattcattcagcaccgtgcagctgacaaaggaaacggaaccgttaatcgaagcggcttcgacgatatacgaatttattgccgacggcgattttcttccggattatgaggcttggcaaaatggcgtcctgcgcttcaaagaccgcgagcttttgctggaaggctttacggcagactggttctcagccgcggtccaggactacattcagtacaatgatgacctgctggaaaaatggcggcagatcgaaacccgctcgccggccgttcatacgtttaaaggctcctttttggatgaagatgattttctcgagggaatcggctggcatgacgatctgacgccgtttaccgtcgggctccgattaaacgagcctgatttcgacggtgacgactggaaaatcgaaatgtttttacgtgagaaaaaaaccggctccatcaccttttttgacggactgaagggactgaaaaaagcgtggcaggcatacagcggaaaaatcgcgcgcgaacaggaccgcttccgcagaacggttccctggctttcgtttgattcaggaacgacgctgatttctgaagaagaggcttggatcttcttatcggaagcgagtgagacgcttgtcgatatgggtgtggagattcttctcccatcatggtggcagattgtccgggacagcaatatgatgctcaaagcgaaagtgtcatcctcgccgcggggcgagtctttcgtcggcatgaacgctctgcttgatttcaactggagattcgccacaaacggtattgagctgacagaggatgaattcaatgagcttgtcgcaaacaacagacgtctcgtcaacatccgcggccaatgggtgaaaattgatccgcaatttattaaacagatgaaaaaactgatggaaaaagcggaatctgagggccttcacatgtccgacgtgctggcgcgcgaactgatggatcacggggaaaacggagccgaggacacggacatcattgactcatcggcatttgccgggatcaagatcgaattatcaaagcagctcagaagcctgatccgcaaactgacggaagcccgggatctgccggagcatgaagtcagcgccgcgtttcagggccagctccgcccttatcagatgtacggcatgaactggcttctgtttttacgggaaaacggcttcggcgcctgtctcgcagatgacatgggacttggaaagacgattcagatgatcgcttattttctccatgtgaaggaaagcggccggcaaaaagcgcctgccttaatcattgcgccgacatcggtgctcggcaactggcagcgtgagctccagaccttcgcgccgcagctgaaggccgtgcttcattacggtccccgccggccgaagggggaagcatttgtcccggcctatcaggacgcggacgtcgttcttacttcttacggcctgtcgcacgccgatcaggaagagctttcttccgtgacatggagcaccatctgccttgatgaagcgcaaaatattaaaaacgcgcatacgaagcagtcccgcacgatcagaaagctgaaaggcgtccatcatatcgcgctgagcggaacaccgatggaaaaccgcctgacagagctttggtcgatctttgattttatgaacaaaggctatctcggcagtctgaccggctttcataaacgctatgtgctgccgattgaaaaagaccgtgacgaaaaaagaatcaaccagcttcagcagttaatccggccgtttttactgcgccggacaaaacgggatgaagaagtggcgcttaatcttcctgacaagctggaacaaaaagagtttatcccgctctcagccgaacaggcatccctttatgaacagcttgtcaaagatacatttgaacatatggcttctctgaccgggatgcagcggaaagcgctgattctgagcatgctcggccgcttgaagcaaatatgcgaccatcctgcgctctatttgaaggaagaacagacagagctgttaaacgggagatccgtcaaactggaaaagctgcttgatttaatggcggtgatccgcggacaaggggaaagctgcctcattttcacccaatacattcagatgggcaacatgatgaaacgcctcctggaaaaagcattcggagaaccggttcagtttttaaacggaagcctatccaagcaggaacgcgattctctcgtcgaacggttccagaagaaagaatacccgacgctgattttgtcactgaaagcgggcggaaccggcctgaacctgacggctgccaatcatgtcattcactatgacagatggtggaatccggcggtggaaaaccaggcgaccgaccgcgcctaccgaatcggccaggaacggttcgtccacgttcacaaactcattacgacgggaacgattgaagaaaaaattgatgccatgcttgaaacgaaacaaacgctgaacgatcagattatccaaagtgaaaattggattaccgagctgtcatccgctgagcttgaagaactattcaccctcagcgcatcggcgcaatcacattaaacgcaaaaaggccggctctctcagaagagccggtcttttatgtcgtccttactgttacgccgcatttgccatgaatgcgtcacgccagtcatgaacagtatcgccatacctttcacagtaaattcctgatcatatgcgcaacgccgttttgatcatttgtcaatgtaacggcatcagcgatctctttaatatcttctctcgcattccccatcgctatgccttttccggccgcctgaagcattgaatagtcatttaagctgtcaccgaccgcggcggtttcagccatcggaatgccgagcttttgcgccagccgtttgagcgcctgccctttagaggcgtttcgagacgccagttcgaagttgtggtcggcagagctgacaagggtgagatctttctgaccgctgaatcggtcccagcccgctttcagcttccgctcatcaaacgaaaatccgagaatattataaaaatccagatgctcttctttctcaaagagctcacggtatgaatgaatgtaagcaaagccggattggctgtattgcactgaagccgcctgttccaaaacggaaagatcggtttccggattggcgcttttcacccggtccatttcgatatcgagcagctgcctgccggtttcaggcgtatagatggctttgtttgtaaacacctcatagtaatattgattctcttcaagccatgacaaaatgccgcgggctcttgtttcttcaatcgcatcacagtggtacagtctgccgtcaggagcatgaatggcggctccgtttgcgctgataatccatgtttttatgccgagcggttcgaagatggagtgcacgtcaaaatgcgcgcgtcccgtggaaaccacgatttcaattcccgcttgccgggcttcccttaaagcccgctcattttcatcgcttacttgatgactgctgttcagcagtgtgccgtccagatctatggcaatcagtttcacatgtcctcatcctcttcttcagattcagttacaagcaattctacgccgtgccggtcgagcagatcgcaaaaatcctgttcaggcagctgatcggtaatcagcaggtcaatctcatgcaaagctgcatactgataaaaactcgtacggccaagcttggagtgatcgctcagcgcaatcacctgttcagcctgtcggatcattttacgctttaccatgccgtcttcttcatgcggaatcgtcaggccgttttccgagatgccgacaacgccgatcagcaccttatcggcgtgataatcccccagtttttctacgacggaagccccgtataaaaaccggtgttccttctggagctttccgccgagcaggtgaatatcaattccctcttttgcggaaaggatatcggcctgattgatcgaatttgtaataacagtgcagccggtgacatttaaatgctccgcgcaggcctgcacggttgtcgaggtgtccagaatgatccggtctcctttatggatcagggatgcggccagcttgccgattttgtttttctcttcagaaacggttttcagccggcccgaatagcccggaacttcctgattcaccgacggcagaatcgcgccgccccgtgttctgataatggccccgcgctctttcagctttacaaggtcccttcttgcggtatctcttgaaatatgaagcagcgaacatatctgatcagcggtgatccgccgatgctgtttcaaatattccattatcgcaatcagtctttcttcttgatacacgtcctcattccctttttcgtcacttatctgtaagtaattataagtttttatcccaatatattcaatgtttttaagtattcataagcgaaatcacttctttttaaccattttttagctcccgcacaaaaaaaccagtctttcgactggcgagtgggaaggaggtattgcggggcccgctgaaaggcgggaaatcgaggaaaaaagaatgctattcagccagcggctctttctgtttttgatccataaaccgaacggtatcagccatgacctcggtcacataaacttttacgccggctgtcttttcatagcttctcgtctggattctgccgcttacaccgaccattgaccctttttggcagtacaatgccgtgttttcagcgttttttctccagatggtgcagttgacgaagtcggttccggtttcacccgacgcgcttttaaaattgcggtttaccgccaacgtaatatgtgcgacgggaatgcccgctgctgtaaaacggagctccgggtctttcgtcagccggccgacaagcataacgtggttaaacaagccgtatcctcctctctttttcgaggctggcttcattgtagtacaagggctcgtgaaagcaaaaagcggataaagccgttatccgttcaggctgctcttatgttttcgtttttctttctgataaaaaaaacttttgtttttgaccgcttatgtaatatgtatttttgagcagccgcgagaaaagtttcgttttgagccagtctttctcaaacatgcggacaaactttccgccatcccatgcgaaccagtaaaaactcagctttttatcagtcagtgaaagctgaattttatactgttccatgcggtcttttgtttcatataaaaagacgacatttccccttctgttaatatgcacctcacaatcttcctttttgcataccaagtaggaatgatcgtcttttcgccttgaaccgtcttctatatagatttccttcaggcgcaattgattcataagcatctctccatgaccatattcttttacattataatgaaaaaatagaaatgattaaatgttgaccgcctacaaaaatgatgaagcatgtcttacagcattttcccgggaaaaatgatatgtgttataataaatgaacgaaaaacatggacaacaggggtgaaaataagagatgaaaacctttaaactggttgatctgaatgtggaacgtttagataaagacgatcagccgattgagcagtttccccttttagacggactgattatcaataaagaggacggagaaaatcattggttaattgaagcactggtcccggccgaacacttgtctttttttgacatgctgatgaaaagccagaaagaagcgaaggtgtttgtaacgattacgaaaaaaagcaaccgccccgcccagctgacgggaagcatcaaaaatatcgtcgagctggaaagaagtatacaagttttaatttacggtcaaatggtgtcaagaaatcaccccggatcagaaagcattctggagtcgctcgtgaaagaaggctactcgggcagccggctgattgaagcgtttaaacaaaaattataatcatgaaaaaggccggacgttaatcatccagcctttttttgtgccctagtcattgtgaggagcccgctgtttcagcagatctctgatttcagtcagcagttctgtctgctgatctgtttcctcggcttcttcagcctcttcttctgcttcctttttacgtctcagcttgcctattgtgcggatcacgataaagatagaaaatgaaataatgaaaaagttcacaatcgtttgaatgaagcttccgtacttgatatgagcatcaccgaatgtcacggccagccctgaaaagtcaagaccgccaagaagcaggccgacaagcggcatgatgatgtcttcaacgagcgacgtcacgattttgccgaaagcgccgccgatgacgacaccgattgccagatccatgatattgccccgcatcgcaaagcttttaaattctgaccacattacattcacccctttctatacaaaatgggcttttttataagcccatttgtttgtttttattctccgagcgcaaaagttaattcagcttcacacacgagctcgccgtcaactttggcaacgccttttccgcgtccgatcgtaccgcgcgcgcggataatatcaacctcaagctccagcttgtcacccggttttacctgctttttgaaacggcagttatcaatccccgcaaaaaatgcgagtctgccccggttttcttctttaatcagcatcgcaaccgctccgacctgcgccaaagcctctacgattaatacgcccggcataacagggtattcaggaaaatggccgttgaaaaaatcttcatttgccgtcacatttttataacccgccgcccgttttccttcttcgacttccgtaattctgtctaccagaagaaacggatagcgatggggaataatttctttaatttgctgagtatcaagcattctcttgacatctccttcatcgacaatagtatgtatagaaggcatatgtggcaaccaatctgtacatttggaagtatattatgaatcaatttctttttcaaccgcgctgtaaactgtaaccagctggcaatgagcctcgtccattaatgtgttatgataaataaagatttttaccctatgcaaagaggttggaagatgattgctaagtttactgaaaaacgtacgctggtgatgctgaatgagtggtatgacgccatgggaaaacgccaattcgatctagcccgttcccttcacgaacaaatcaatcagcatctccccaaattacaaaagaatgcaaagctcaaactcagatatcagctgtttttcgcacggttccagctgctgtttgagaaaaaagacggtctgaataagctgttctgcgagctgaagcggcgcaaagatgagatggatcatgaattaacttattatttctattttttcaaagggttattccatatggtgaatggcgctccgaaccgtgctgtctgccgctttaaagaagctgaacagtacctgccggccattcaggaccgtttcgaagccgctgaattttattataaaacagcgggtgcatattacatgatgaagtcgcctgcgctctccattcaatatgtcaataaagcgctggaaatctatcaaggtgaattcggctacatcaaaaaaacgctcagctgccggctgcttctcgccgtgaattatatagacgaggcacgctatgacgacgcagaacagctcttcaatgaatccataaagataacggaccggatcaatgacaataacctgctgtgccacgcctattataattttggttttttaaagaccgcccagaaaaaagataaagaggccctccctttttacaaaaaggtattgggcaatcagcgtttcgagaaagagtctcccgtttcctaccttcattgtgtgtacgaagcggtcagagcactttttaaaaccggctctgccgccgaaggacaaaccgtgctgcagaaaggtttatacatatctgaaaaagtgcagaacaagattatgaaattgaagctgaccgcgctcaacatactgtacaccgctcaggaggacccgtacgaccgattgcagaagctcgtgctggagctgcagaaaattgaagcgtgggtggatttggaagtgctgcttcaggatattactgattactacaaaaaaaagggcgattttgagaaagccgcattttttatcatgcgcggctgatcaaaacgccccttcttttatctgactgagttgattaagcccagcatttggtctcccaatgtaatcgtgcggctgttcagctgataggaacgctgagacacgattaagtcggtcatttcttttgacatatcgacatttgaaccttcaagcgcgccctgctccatgccgattgcctgccggtttgcgccggtaaggtcttcaatcgctgaagcccccgcgccgtttacggaaaacagattatccccttccgcatgaagcgcctgcggattattgacattgacgatgccgagattaaacgtctgcgaacgggttcccgcctggtctgaagcagtcagcgttccggttttgctgattttcagctgagtcagcgaactgtcaatttgtatgggctgaccgttctcatcgagaatgggattgcctcccgctgtcatcagctgaagcagccggtcatttccgccggccggcttgagggaaagtgagccgtcccttgtatacacccgccgtccgtccgcttctgcctgaagatattgataaggtgatgtgaacgcgatatcaaggtcacggtcggtttttttgatgcttccctgccctgagtccagctgcggagtcatcaccgttccggcgccgagacgcaggccgggcggcgttttccgcatgttcggcgaattttcctttttgtcatctatatggtcatactgctgtctgatcagctcggaaaagcgggagtccctcgctttatagcctgtcgtatcactgtttgaaaggttgctgctgactgtatccatctgctgctgaagctgatgtaaggctgttgaagccgtcagcattgatctgagcatcataattgaatgtcccccattttgttacactttgccgatttcatttgcggctttatccatgcttttatcgtaagcctgaatgactttctgattggcttcaaatgatctgtatgcttccgtcatttctgtatacgtgctcgtcacgtccacgtttgaaagctccgagacgccttgctttaatgaatacgagacttggggattcgccgccgcgctcggcagttcagagccgtcggccgtgctgtataggtcattgccgtcccgtttcagattgcgcacgtcttcttccattctgatatcaatctgccccgccggccggccgtttgtcgtgaccgttccgttttctgatacggtgaatttttcattgtcgactgtaatcggctgtccgtttgttgataacacaaggtttccgtttatcgtaagctgattgttttcatttaatgagaaagtgctgctttttgaatagcggacgccgcctgcggtctgcacgggataaaacagctcggcgttttcattcgtttcggcattcttgggaacctgattctccataagcgcgatatccgtcggctgatcggtcgttttcaggcttccctgcgtaaacaacggtttcagctcctgcatgtatacgcctgtgttgacggagccgattttcgtttttttgtcgccttctattcggctcagaagcatctcgggaaaggcgcggattgaaccttgatcctctttgtaccctgacgtattcgcgtttgcgatgttatttgacagcatttccgttcttctctgctgtgtaatcattgcggacgttgcggtatataatccttttaacaagtcttccacctctgaaatagcattatttccagttgcctcaccggaacatttgttctataatgaaaatcagcattttttcttattatcggatttacattcccgttcgtgaagggtttgacagaaaaaaaccccattctttttcagaatgaggttttatcatcagctcagtttgcgttttggaagcttgtccatgttatccagcatgacgccggttccgaccgcaacacaatccatcgggttctcagcaacaagaacaggcaccctcagctcttcggcaagaagctggtcaagcccgttcaacagcgctcccccgccggtaatgataacgccgcggtcgatgatgtcagcggacaattcaggcggtgttctttcaagaacctgcttggcggcctgcacaatgacggcaactgattcacgaagggcttcttctacttctttgctgtttactgtaatcgttctcggcagaccggaaaccatgtcacggccgcggatggtgatttcttcatgacgtgcgtctgggaaaaccgttgcgaccttcaccttaatatcttcagcggtacgttcaccgatcagcagcttatactcgcgtttgatataatttaagatttccatgtcaaacttgtccccagccatcttaatagaagaggaggtgacaatatcgcccatagaaataactgcgatatctgtcgtaccgcctccgatgtcaacaaccatgttaccgctcggctggaagatttccatacccgcgccgatagcggcaactttcggttcttcttcaaggtacacatgctttccgccgcttttttcagctgcttctttaatcgctttttgctcaacggatgtaatattcgtcgggcagcagatcagcatgcgcggttttgagaaaagtccttttacattcagcttattaatgaaatgtttcagcatggcttctgttacttcgaagtctgcgattacgccgtctttcagcggacggatcgcaacaatattcccaggtgtacgtccaaccattcgtctggcttcttcaccgacagccagcactttgccgctgtttttatcaagtgccacaacggaaggctcattcagaacaattccttttccttttacatggatcagtacatttgcagtaccgaggtcaattccaatatcccttgcaaacatctatttatatcctccttgatatctgtttcacagtaaaatatccacattgtgccctaattatatatattatcataatttatcaaaaaaaagctgctgaacgatataagttcttgacaaaattttgcggatattcgcgaaaccgcccgggaggagaaaaaagggcccggcagacgtcaggcgctacggctgctgaacgggctccccttcaagaatttcatccttcttgtactttaatttcgtcgcctctccccctcttaaatgtctgatggatttatgataatcgagtatttcttttacttcattcgccaagtcaggattgatttcaggcaggcgctctgtcagatctttgtgtacggtacttttggaaacaccaaactctttcgcaatgacacgaacggtttttttcgtctccacgatatacttgccaatcttgattgttcgctctttgatgtaatcgtgcacaccactcgacctccccagttggatgtgagaagtgtgaaatgagatccgtattctgtaacagattcactgatgatgcagcttcttcgttgtccgattatataagaaggttttagaaatatgcccacgatccctcacctcaaacactctctttgataggtttgtaacagtgtattagcaatgaattgggaatatgccaaaaactcaataaggacaaggggcgggtcataattttctgctttttgatcggggggtttacatccgcgcgatcctgctgtagaatgaaacagcacaattagttacttaggtaagttttttgaaaaggagaacggaaatgatccacgtcaacagacgcctcattcaccaaatcaatcaatgcgcccgcctgattacgaagaaagccaatgaacggctggaaccattcggcctgtactcctctcaatggtcaatcctatattgcttaaaaacgatcggaccgatgacccaaaaagaaatctggtcctatctgaacgtagaggcgccgaccgttaccagaacgatcaaacgccttgaagaaaacggctggattcagcgggaacagggagaagacaagcgggaaaagctcgtcgtcctgacgaaggaagctgaattgaaatacgacagcattaatcaagagatgctgaagttcgaggaagacatgcttgcggatttccaagatggagataaggaagctttttctgagtttctgaatgtgtttttaacgaaatagaaaagaaagggaagtgctgtacttttgagtaaatctgactcgatctggaccaaagattttattatggtcgtactcgtgaatttatttgtctttgtgttcttttatacatttttggccgtgctgcctatctatatgattcaggagcttggcggcagtgaatcgcaaggagggcttttgatcagcctgttcctgttatctgctattatcacccgtcctttttcaggggcgattattgaacggttcggcaagaaaagaatgacgattgtatccttggcgctgttcgccctgtcttcttatctgtatttgccgctacacaatttctatctgctgctcggactgcgttttttccaaggcatctggttcagcattttaacgacggttacgggcgcaattgccgctgacattattcccgccaagcggcgcggcgaggggctcggttattttgcgatgtctatgaaccttgccatggcgatcggtccttttctcgggctgagtcttgtgaaagtcatttcgttcccggttttctttacgatttttgccgtatttgtttctttaggcttgctgattgcttttatgattcgtgtgccggatcaaaacaacagcggaacgactgtcttccgtttttctttctccgacatgtttgaaaaaggcgcgcttaaaatcgcgattgtcgggttgtccatttctttctgttattcaagtgtgacttcatatttatccgtttatgccaagacgatccacctgttggatgtcagcggctatttcttcgtctgtttcgcagtgacgatgatggccgcccgtcctttcacaggaaagctgtttgacagagtggggccgggaatcgtcatctatccgtcgattatcgtgttctccgcggggctttgcatgctggcgatgacaaacagcgccctcatgcttctcttatccggtgccgtaatcggtctcggatacggctctatcgtaccgtgtatgcagacgctggcgattcagaactcgcccggacaccgttcaggctttgcgacggctaccttcttcactttctttgacagcgggattgccggcgggtcctatgtattcggcctcttcgtcgcttcggccggattccattcgatttatctggcagcagggctgttcgtcctgattgctttactcctgtatggctggagccagaaaaaaagaacgccgcttcaagcggacggaaacgtttcaatcgcagactaatatgacaaaaagccgggggcagccccggctttttttattcggccgctctttcccgcgcgattcgtcttgccgcttttgcataaggaggatgaatatacataagcgccgtataaccgagacatgacaaaatgacacccgcaaaccaggagatatcatagatgccggcgaacgccgggacgtacatcccgattaaagaaataaacgcgccgagaaaagtcgcggcaaaggcccggtaattatagcctttgtaataagtgtactgtccggtttccgaataaaggtcttcaactgagagctgcctttttctgatgataaaataatcagccatcatcaccccggccaccggtccgagcatcccgccgatgagcccgagaaacgcataaacattcgtggcgctctccatcagcttccacggtattgtgaacagggccaaaacggcggccagataccctcccctcctgaatgtaatatacttcggcaggacattcgccaagtcataggccggtgacacgatgtttgccgccacgttaaccgagacggcggcgatgcaaagtgtgatgaccgaaagagcgataacgaaaggattatcaaaccgggccaaaatctccaccacatcccaaatcggttctccgaatgctacctgtgatccggatgtcaccgtgatgcttgcaaacgcgaacagcgcaaacgttcccggcagcccgtaaaactggccgcgaatctgttctttttgcgacgcggcgaaccgggtgaagtcagggatattcaggatcagcgtcgcccatattccgataatgcccgtcacccctgcggcaaacggccaaaacgtttcagaaaaggtgtggaactttcccggctgtgagtaaatcggtccgagcccgccggcaatatctatcgcccaccagaccatgccgccgaagacgagataaacaagcgggcccgcccacacttcaaattttttgattgattccatgccgtgccgcagcacaagcagatgaatgccccaaaagaaaatgaacgacagaaaacccggcagatgaagcccgagtatattccaatctccgccgagactcccccagcccggccatatgttcaaaagcagaatgtgcaaagccgtgctcccggcaaatgtttgaattccgagccacatgatggctgtaaacgccctgagaagcgccggaatgttagccccgtatattccgtaagaagccctgataatgaccggaaaaggcagtccgtatttcgttccggcatggccgttcaaggccaaagcggcgaacaaaatgagtgacgccgtcacgataatggcgagcacctgccacggagaaaggccgatcgcaatgagcccgcccacagtcgcgtaggtcgggatattatgaatacaacccatccagatggatgcaaaattcaccgctttccatgtccgttcgccgtcttctaaaggcagtaaatctttattgcttagccgatcactcgttgtttttttcattttctccctcccgcatgtgcgttttccttacatcacatgtgaaaaaatataactgaaaattccataaataacattggtcgctgtcgacaataatcgttttgatttttgagcacattacacaaaaaaagagacggggagagcccgtctctttttgttgcgcctgttaagaggcttttttgaggagaaccgaaaaccggaacgccatcaaaaggcttacagcgccgacaacgataagaatcgtcccaagcatatgaaaatggccggcggtaatttcttttccgaaaagaatgcccaaaatgacagaagacaaaatcgaaccgagataccggcaggtctgaaacaggccggacgttgttccggccatgtcggcggggctcgttgtcagcatggccgcctgaaacgtgacatttccgaagccgtagccgacacccagcacggacaggatcagcccttttcctatcatgggcgcctgaagaaagaaaaacgttaacagcaccgccccgatcacggtcaggcaggttccggcaacaatcggctgaagaagccctttcttatctatccattttccggtcagaggcgacaccagaatactcatgcccgacataaacagcataatcaacccgcttgtctgaacggacaaatgcatttcatcctgaaaatagctcggaagcccgaaaaagatgcagtaaaagaatatattcagcaaaataaattgaatatacaccgacgatagtttccgatgcgttttaaacagcctgacatcaataaacggcttctccgttttcagctcgcgccagataaacagcccgacaaacaaaagcccgaatacgccttctgtatagtgaggcttcgtactgaaggacaataaaaacgacaggagaaggataatcgctccggcaaacaggagtatcccgatcgtatcaagctggcggagcacgcctttcaagccgccgatctcgcgtttttcatctttcggaaacatatacattccgagaaaaaagctgagaatgataaacggcagattgacgaaaaagattgccggccaccctccccaaacgatcagaaaaccgccgagagtcggaccgagcgccgtcatggctgatgcaaagattgacaggacggccagcgccgaagcctgcttctcctgtatatttgaacggatcaatccgacgccggacggatatatcgcgctgcttccgatcgactgaaacaatctcataattaacaaagtcataaaagtcggcgcaaacggcgcgccgaccgctgagacggcaacaagcagaagcccgatcaaaaacagcttcttcctgccgagcatatcaccgagcttcccggtaacaggctgcgccaccgcgctggccagataaaaggacgatatcagccaggacaccgttgtaaacgacaggtgaaattcatgctgaatactgtgaagcgcaagagaaatcatcgacgagttcaatgggttcagcatcgtccccgaagccacggctgtcaagaacaggacgcggctttttttggagattgtcattttgtctgtgtgataaattcttccgtcgtccggcttctgccgattttcgggaagataaacttgagtgtcgcttcgtgctgttcatcgctgaatgtcgccatcgcgtcagttacgaaaacttgctgatacccgagctgaaaagcttctcgcgccgtgctttccacaccgatgtttgtcgcaatcccgcataacacaatcgtgtcgattccccgtcttctgagctgaaggtccaggtccgtgccgaaaaacgcgccccactgccgttttgttaccgtataatcgttttctttcactccgatgtcaggcacaaattcagcccaatccgccggcggagccgaatggcccgccgcctcttcatccgtcagcggcttcagcgcatccgctccgtcatgaaaatccacgttcacaaagctgataaatccgcctttttcccggaacacatcaattaattttttcgcgttcggcacaacggtaccgcttttatccatctgcacaatgcctttttgtaaatcaataaggaccaaagccgttttttcaaattgcagatttaatgatgttgtcataatgattcctcctgatgcagttagtgtttctcaccccgtttattttactcttccccggacaggatttcttccgccgtgctccggcgctctttttatggatataaagtcgcacggcacccatttgaaaaaacagtattatgaacgcaaaaaaccatgtcagataaccttacacgaaaatgttttatcgttcttttttctctataataatgaattaatcacaattacattctgaatgagacggaggaatacaacatgcagatgggcgatacagtatttatgttcttttgcgctttactcgtgtggctgatgacccccgggctggctttgttttacggcggaatggtaaaaagcaaaaacgtgctcagcacggcaatgcatagtttttcttctctcgccatcgtatccgtcgtttgggttttgtacggatattcacttgcttttgcccccggcaatacatggcttggcgggattgaatgggccgggctgaagggggtcggctttgaacccggaagttacagtgatacgatcccgcattccttgttcatgatgttccaaatgacgtttgccgtactgacgacggccattatttccggagcatttgctgaacgcatgagattcagtgcttttcttgtattttcctttttgtgggcttccctcgtatatacgcccgttgcgcactgggtatggggcggcggctggatcggccaaatgggcgctcttgacttcgcaggcggaaacgtcgtccacatttcttccggagtcgccgggcttgtgctggcgattgtgctcgggaaacgcaaggacggcacggcggcttcgcctcacaacttaatttacacgttcttgggcggagcgctcatctggttcggatggttcggcttcaatgtcggcagcgccctcacgcttgacagtatcgcgatgtttgccttcattaacacaaacaccgcggctgcagccggaattatcggctggattttaatcgaatggatgctgaataaaaaaccgaccatgctgggtgctgtatcgggcgcaatcgccgggcttgtcgccattacgccggctgccgggttcgttacgccgttctcttccatcgtgatcgggttcattggcgggcttgtctgcttttggggcgtttattggctcaaaaagactttcggttatgatgatgcgcttgacgctttcggcctgcatgggatcggcgggacatggggcggcatcgcgaccggtttattcgccaccacttccgtcaatgacggcggggcaaacgggctgttttacggcgatccgggactgctctggaagcagattgcggccattgcggcaacctatgtatttgtatttattgtcactttcgttatcattaaaattgtaggtctgttcattcccctgcgcgccagtgaagaagaagagtcacttgggcttgatttaacgatgcacggggaaaaagcatatcaggacttataaagtgaggagtggcttagatgagcggtcaaatgttcaaggtagaaatcgttacgcgtccggctaagtttgaaacattgaaacaggaactcggtaaaatcggagtcacatcgctgaccttctccaacgtacacggctgcggccttcaaaaagcccacaccgaactgtaccgcggagtcaaaattgagagcaatgtgtatgaacggctgaaagtggaaatcgttgtcagcaaggtccccgttgatcaagtcgtggaaacggcgaagaaagtgctgaaaacgggagagcccggagacggcaaaatattcgtctatgaaatcggaaacacgattaatatccgcaccggagaagaaggaccaggagctttataaacaggcagaacgcccggagacagaaatgtcccgggcgtttttttccagcttcattaaaaagaagaaacctttttttcatgcgggacaggccgcttatgccgtacgggttgttttttcgcatatgtactgatattgaccagtatgccgcacaaaaacagcgtcataattaatgaagaaccgccgtagctgataaacggaagaggcacacccgtaaccgggagaagtccgctcatcgctcccaaattcaatacaacctgaaacattaattgaaacgtaattccgatggcaagaagcttcccgaacgggtcatcagcccgcacggccgtttttacgccgagaagcattaacgcaaaatataatcccaaaacgatcagaacaccgaatatccccagctcttcgctgatcacggccataatgaaatcggtatgcgcctcaggcagatagttcattttttcaacactgtttccaagccctcttccgaaaaacccgcctccggaaatagcaaaataggattgaatcagctgatagccgtccccattcgcgtcaccaaacggattggtaaaggaaacgaggcgcttcacacgataggaagcggaaaatgcgagataaacaacccccgacaccgccgtcgcgccgagcacgaacagatggcgctttttcaagccggcacataataaaatcgacccgcacgccgccaggattaaggaagccgtccctaaatcaggctccgccaatgtcagcagaaaagcagttcccaaaatcactaaaggcggcagaacccctttcacaaattgatgaatgtacggctgctttttcgtataaatcgaagcgaaatacaaaatcatcgcgatcttcgccaattcagacggctgtacgacaagcgggcccgctcccagccacctgcgggaaaaattccgctccagcccgattcccggtatcaatacgagcagcagcaataccagcgaaccgaccacaaacagcggtacaagccgcgcataccgcttatacggcagacaggcggcaaatagaaataagcataatccgatcagtaaagaggcactctgcttatggaagaaataggatggatctccgtaccgctgagaccccatcacatcactggcgctgtacaccattaacaagccgaatccgcaaagcagcataatgacaaacacaagcggcagatcggcgtttttcaaacgtttcagcaacggacaaaactccttcggctattcttttcccgcatacttgacgcacagtaatacagtcacgtttcattctgtttacttttttatgattatttttaataccaattgtgtctcatagaaaaaagcattacactgttcatataaaataaagataaaaggtgatatttgtgaattacgaactatttaaagcgatcaatggtttgtcgcaccatagtgccattctcgactctatcatggtatttattacggaatacgccatttacgcctacgcccttttcctgcttgccatgtggctgttcggaagcacaaaaggcagacaaaacgccctgtacgcgggcttcacgggtgttgcagcgcttatcgtcaactacctcatcacgaaagtctatgtcgagccgcgcccctttgtcgaacatacggttcatacgctgatccctcatgccgcggatgcttcatttccgagtgaccatacgacaggcgctttggcgatttcaattgcgattctgttccgcaacaaaaaactcggctggccgcttgtgattttcggccttttgaccggcttctcaagaatttgggtcggccaccattatccgatcgatgtgctcggaagcattatcgtttccctcattgtcggattcctgctgttcagattttcaaatgtgcttcgtccgattgtcgatctgatcgtgcgaatctatgaaagtatcgttcataaaagcaaatcgacaaaccataatatataaaaaaagccggcgtctgtcacagactgccggtttttgtatgtttggctgtatgctttttcctttgtaaagcacagaatgcggcaatgccgagactgtcaatcagcacatcgcggaggcatccgtttctgccgaaaaagagctggacgatttctgtcaggaaagcggcggccaatgcatacagcaccgccctcttcatgcgcctgcgctctctgaaaaacaaataggcgagcacaaaaaatgaaaacgcgtgcccgagcttttgaatcgccgcttccgatatggcgagctccgccatatcgaacacaaagaaaccggacacatccggatgcggcgtgaaacggaaggacaccgtctgtgacacaatcatatcgtgaaagctttccgtcaaagccgaaacgaaaacaaagacgagccacccggccgccagacatttattcattcagcatctccttcgttttctactagtataaaggcacatgcggcaatatgaaaagcgcctatctgagctgataggcgctttgggatcaagattacttgcccgaatctttcattgagccgtcatctttaccatctgtcttgtcttttgtgccgtcctctttgtcacctggtttttcttcggtttcttttttaggcgtcacatcttttttctcggaagactgctgaattgacccttccgtttcttctgtcacagcgtttttctcttcagccgccgctttttcaatagatgttaccggcttgtccataaaattgagcgggttcatcgctacgccgtccttgcggatttcaaagtgcacgtgatttccgctttcttcactgtaaaggttttttccggatttaccgatgacctggttctgctttactttgtcgccctgatccacgctgacttcagataaagactgatagacagtagacaggccgtctgagtgttcaatttcaaccacatatcccagtaccgggtctttagcagctttaacaaccgtaccgctcagagaagcagaaacatcaaatgattttccgtctttctcagctaagtcaattcctttactgaggctgtacgtgttattatagttaacaagtgctgcttctttctctttttttgcggcatcagtttcataaaactttttcacaacagaaacattttcagaatgagcagccggcattgcgacgttttccattgacttgcctacttcgacggcatcgtctttgccgctgtcatacgcggagtttccgccgttgttcgtcagattgtccttcacatcattcgaaacggattgataccaaaggacagctgttaaaatgacggccgcactgactaagtagattgcagggaatatccagcgtttgcgaaaaaaccgctgaagttttttgacttgagaagttttcttttcttcctctctcatttgttcatcacctcagcaacattctgaacacttttctgaaaatatatacacatccataaaaaacttttttggaaatagtatgtgcagattgcacttaattatgtaatgaaatgtgaagggagatcccggaatatgaatttgaccctgcgcaaagccgtattggaggatttaaatgcggtggtggccatatacaactcgacgattgcctcacgaatggtaacggctgatacggaagaagtgacgcccgcagaccggatggattggtttttgcggcacacggaccggcgcccgctgatggtcgcggaagatgaaaccggcaaagtggcggcctggatcagctttgaaacgttttacggccgtccggcctatgacaaaacggcggagatcagcatctatctgcatcaggattgccgcggcaaaggagcaggaagctttctgctgaaagaagccctggcactcgctccggcaatcggcatccgcagcctgatggcttttatcttcggacataatgtgccgagcattaagctgtttgaaaaattcggttttaccgaatggggcgtattcccgggtatcgccgaaatggacggaaaacgatatgacttgaacattttagggagagaactgtcatgatcaccattgataaagacaaagacgaaaaccagccgctcaataaaaaagcccgttcccttgccgacatcgccaaatggggaaagatcaccgccgtgtttctgatcatcacgggctctctttccgctctgtcagccattgtgacgctgctcggagccattccgggggttctgctcatcatttccggcgtcatgctgatgcgctcggcaaaagcggctgccgcacttcaggaaggactagaagaaaacgcggaagaaaatatgcttgcacattacgcgtcatttatcaaaatgcagtttttttatgcggcatccagtgtggtattgggcattctcgcttttattttagtcgtcatcttcgctgtcatcggaattatcgcttatcacagcactgatacgtatgacacgcctgattcatattactatgagaacgacccggtgtttgaatgacaaaaagagctgatcgcgcgtcagctcttttttaataaagcatttcttttttccggtcttcttccgttaaaaattcaataaagctcttcatcgcagacggctcctcggcaatcagacgggtataggcgcttttccgttcctcagacagaatatcgctttttctgattctgttcagcatataaaggcggatcgttttttgcacctgtttccgctgatagccggcttccttaaacaacgcaagaccccaggccgcaaggagggcaaaaatgccggccgacacgagagctcctctcccggaaggggcctgaatcaaaagcgatgccagatgaaacagactaaaagcggcgagcgggaaagcaagaaaacggtaaatgatgctttttttcatcagcggcgcaatggcgatttgtattttctgaatttctttttttatgaatcccggcaattgttccgcatgctccagcttcatgccctctcccctttgctgtcatttttgtcttctttttcatatatgcatattttaccgcacccggaactttctttgaaagaaaactgcattcatctttgattccggctctttattctttcaaaatgtcaatgttataatttgaaatgggaatcagattgctgcacttgtcggaatactaatgggcacagtcttgataaatatgatatagcggggttgcaaagtgagcatttcatttattttatttggattttttttcgttttaaatatactgttggccgtcatcatgattttcaaagaaagacgcgatgccagcgcttcatgggcttggctcttggttcttttttttattcccattttagggtttattttatacctgttattcggccataacctgagacgcaagcatctgtttcaatgggaagaccgtaaaaaaatcgggatagaaaagctgctgaagtctcagctgaaagatctgaagtcgaggcaattccaatttaacaacagagcgactgtggataataaagacctcatctatatgcttgtcatgaacaaccacgcagtctttacagaggataattcggtggagattttgacggacgggcgcgataagttcaaacgcttaatgaaggacatttccaacgcaaaagatcacattcaccttcaatactatatttataaaggtgatgaactggggaaaaaattgcgcgatgccttagtgaaaaaagcacgggaaggcgtaaaagtcagagtgttatatgatgaactcggttcaagatcactcagaaaaaaattcttcaaaccgctgcgggacgccggcggccatgtggaagtcttttttccttccaggcttcgtccgattaatttgcggctcaattatcggaatcaccgcaagctcgtcatcattgacggcgaaaccggctatgtcggcggctttaacgtcggagatgaatatctcggcctgaatccgaaattcggctactggcgcgatacgcacctcaggcttcaaggcacggcggtgcacgctattcagacacggtttatcctcgattggaatcaagcctcccatcatcatacgctcacatacgttccgaatcattttccggaatgcgagccgaagggcaatgtcgggatgcagattgtcacgagcggaccggattcagaatgggaacaaattaaaaacggctatatcaagatgatctcaacggccaaacggtcgatcctgattcagacgccttactttattcctgactcaagtcttttagatgccctcaggatcgcctgtctgtcaggcatcgacgtcaaaatcatgattccgaacaagccggatcacgctttcgtttactgggcgactttatcttacatcggcgatcttttgaaagccggagcctcagtctacatttacgataacggctttattcatgcaaaaacgattgttgttgatgatgagacggcttcagtcggtacggcgaatatcgacgtcagaagcttcagacttaattttgaagtcaacgcctttatttatgacgtcaccatcgcgaaaaaactcatttcctcatttaaagaagatctgctcgtctccagaaaatatacgtatgaagaatatcaggagcgttcgctgcggatccgcattaaagaatcgatttcacggcttctgtcgccgattttgtaattcccggggtgtttctcgggaattttctgatacaaaaacggacacggcatgaaaaaacacattttatattcaaatgaatgaccgaatagtgtataaatgaaaagtgagtatttttttgtaaaggagtgccatagtttgaaacctgaatcagtgaatcgttcgcttattgctatttcgaaatggggaaaagcgacaggtattttatttattattattggtgcgtttgcggcgctgtcgggcgcgtttttctttttaatcggagccattcccggcgttttgcagatcattgccggcatttttctgatgcgctcggcaaatgaagcgggacagatggcggagcagttcaatgaactgacagaggaacatatgctggaaaattatgcaaagttcgtgaaaatgcaggggatctacctgattgtgacggtcggcttgtccgttctcggtatcgttctcttcattgtcctcatgacgctcggcatcgtggacggcgtgtttaataatattgatgccaatacatattaaaaaggaaaatcccggcgcatccgcccgggattttttcttattccgcttctccgacaacgggaaagtttttctgctttggatttgccaatacggcgatggcataatagcgcagctgagacgctgtctgcagatattctttcagaaattccggcttcagccagacgtgtcgccgtcacatcaaaaaaacttttcctcagagtttcaattgaaatcactcaattgttcgactgttcctgatcaggtttagaagcaagaattgtgattctgcaaaataaggataaaagccctgatggaacaagaccactcatcatacagttttttgggtctttgtaattaaattacaattgttcttaatattcactcatgtattcatgctattatattgaaaggaacgatcaaaagcgttggcgttcgtaattgttttaaatatttacgagtgctgcctcatgtcaaagtcagaaaaaatagtataggaggtaacatatgtttaagtttaaaaagaaattctttgttggattaacggctgctttcatgagtatcagcatgttttcggcaaccgcctctgcagctggcacagattactggcaaaattggactgatgggggcggaacagtaaacgcagtcaatggatctggcgggaattacagtgttaattggtctaataccggaaatttcgttgttggtaaaggctggactacaggctcgccatttagaacaataaactataatgccggagtctgggcgccgaatggcaatggatatttgactttatatggctggacgagagcacctctcatcgaatattatgtagtggattcatggggtacttacagacctaccggaacgtataaaggtactgtaaagagtgatggaggtacatatgacatatatacaacgacacgttataacgcaccttccattgatggcgataacactacttttacgcagtactggagtgttcgccagtcgaagagaccaaccggaagcaacgctgcaatcactttcagcaatcatgttaacgcctggaagagccatggaatgaatctgggcagtaattgggcttatcaagtcttagcgacagaaggatataaaagcagcggaagttctaatgtaacagtgtggtaacagctcatctttaattaggggcagctaacgggctgctgatcgttcctaaagaaattttataatgattgttaagaggcgaacggttttggcattgccggaggcagggtatcattttttgtttaacttcacagctgacaccttcacataagtcttaagcaaaataaaaatatcccggtaaccgcctcctttagttccggaggatttcttcattaaacagatcgcaatcccgcatccaggcgtgtctgaatatggagccaaaaccgtgatttcctcattatccattgtaaccatttttgttacacccctagcggcatgaacccatctctttttaacaaaagagatgattcattacatcataaagggacttgctcgcaagttcattctccattgcccgctgtacgcttccgaacgtctcatcgagcgcgcgctgaatatttttgccgaccggacagtcggggttcggattgtcgtgaaccgcaaaaagctcttccttattctgcaccgccctgtaaacctctaagagggtgatctccgacggatcttttttcaggctggctcccggaacacccgctcgggatgtcagaatacccgcttttttcagctggctgatcgttctccgcacgacgacgggattggtgtttacgctgcccgcaatcatatccgatgacgcccgttcatccgttgagatcagcgatagaatgtgaatggccacagcaagacggctgttaatcatgtttttcaccaccgttgtaaccgcaatagttacatttcatttgtttgtcaactactaatatacactaaaacgggcggcaggatgaaatcaagttggcaatagaggtgtaaacaggccggcgggaaaccggccgaagagggattaaaataagaaataacgctgtccgagcggaacatagctgacgggctggcatgccagctcttctccgtcggcgaacacctgataggttttcggatcgacttgtatattcggcatcgcgtcattcagcttcatgtcgagcttactcagcttacggatattccgtacgggagaaatcattttttcaaggccgagcttttccggcacaccgtttgcgataccggcctgggacataaatgtaatagaggtatttcggtttgctttaccgtatgatgcgtacatctgccgcataaacacgggctcaggcgtcggaatggaagcattcggatctcccatttgggcgcgggcgatcatgccgcctttgagcacaagttcaggtttgacgccgaagaaaaccgggtcccatagtacgaggtcggcgagctttcctttttcaacggaaccgacttcatggctcaggccgtgagtgacggccgggttgatcgtgtatttggcgatatagcgtttggcgcgcacattgtcattgccgttttctcctgatagagcgccgcgctgttttttcattttatcggccacctgccatgtccggataatcacttctcccaccctgcccatcgcctgcgagtcagatgatgtcatgctgatcgcgccgatatcgtgcagaatatcctccgccgcaatggtggccgctctgatgcgtgaatgactgaacgccacgtcttcaggcacttttgaatctaaatgatggcagaccatcatcatatcaagatgctcgtccatcgtgttgacggtatatggaatcgtcggcgtcgtagaggacggcaggatattggcgtaagatgcgagtttcataatatccggtgcgtggcctccgccggctccctctatgtgatatgtatggataacccggtcgccgatcgcatcaagcgtattttctaaaaagcccgcttcatttatcgtgtctgtatggatcgccacctgaatgtccgcctcatccgccgcttccatgcaagctttaatggcgcttggcgttgatccccaatcttcatgcagcttcaggccgatcgcgcctgcttccacctgctcgatcagcggtgctttatcggatgcattcccttttcctaagaaaccgacgttgatcggaaactcctcggccgcttccagcattctcgacatgtaccatgcaccggatgtacaagtcgtcgctttacttcccgtcgcaggacccgttccgccgccgagaagcgtggtcacgcctgaagaaagcgcgacttccatctgctgcgggcagataaagtggatatgcgtatccaccccgccggccgttacgattttcccttcgccggaaatgacttctgttccggcaccgataatcatgtgcgggtccaccccatccataatatcagggttgccgcttttcccgacgccgacaatccggccgtccttcaccccgatatccgccttgacgattccggtataatccaggataaccgcgtttgtaatgaccagatcaagcgctccgtctttcccggtgatacgcccgttctgccccatgccgtcccggattgttttccctccgccgaaaatcatttcttcaccgtaattcgtgaaatctttttcgacttcaatccataaatccgtatctccgagtctgactttgtctcccgttgtcggtccgaacagttctgcgtattgctcacgtgacattttcatcggatcgcctcctccatccatccggcttttttaagatttgacagagtcttctcttttccccgctcatccatatacgtatcggccatgccgttgagacctctgaccgtttttcgccctccgatttccacgagcgtgacggttttctcttctcccggttcaaaacggacagatgtgcctgacgggatatcaaggcgcatgccgattgctttgtcccgattgaaggaaagggcgccgttggcttcggcaaaatgaaaatgcgatcctacctgcactgaccgtgttccgttattggtgactgacacctccagcgtcttccggccttcgttaatggtgatgatcccctttgcgacttgaatcgctcccggcttcatgacttcacctccgctttgatcggctgatgaacggtgacaagcttaaccccgtccgggaacgtcgcttccacctgaatgctgtccagcatttccggaacgccttccataacatctttttccgtcaatacattgcggccggattccatcagctcagcaacgctttttccgtctctcgcgccttccatcagataacaggtcaaatatgcggcggcttcgggataattcagcagaacgccgcgcgccttccgctgcttagcgagctctcccgccgtaaaaataagcaatttttcttgctcaaccggtgtcagtttcatctgtattcccccttagtgatagtcaaacacaatccgcatggtcataccgaaacgatgcaggcggccgtcacccccttcacctcatgaaatgttaagtgataaaagttattcgacggtgaacggcccgattccttttgcagaaattaccgatttctcatttttttcttcaacaaacgtttaatcaaatgtgaagaaaggttacattctatgtgaatattataaagaaatcgccgggtaatttatagaatatttaaaaatttagtgaatattaaccaaatgaactggaatttttgtcatttctcataacaaaaagcccaaaatattttgggcttttgctgtgtttcactatcaaattaatcatcactgagtttatctttcgttttgccgacacccttttgcaggctgcctttcgctttgtcttttttaccttccgcttttaagtcggacttgtctgccatgtcgcctgctttgtccttagcttcccctttcattttgttcattccgccttttactttgtcttttaaaccgttatcttgactcataatatcttcagctccttttgttgttgtgtacttgtgttcttccctctcagcctgatagcaaacatttcaactctcaattattgatttcacagcgttccccgtagcggagcactttgtaaacagccaatccgtctgacagcttattatccccgtattgcaccggcagaagagcaaagaaaacataataagttgaaaaatagacaaattggtaaaaaaataagtttggctcgaggacatctttcatgatcagcagatttactaaaaagatagaagcgatattaaacagacagcctccggaatagacgagcgcgctcgtcagacggttatctatccgcaattcgccgaacttgcagaaagaatctatgaagtagatacgccgaacctgaatcggccctacttttaaaagacgtttccccattccgatatccaatgacgccttgcctccgaacagcatggccataaagctgtgccccgacacatggatgacagacaccatcggcagaatgatgagaaaagatacgaaaaactttatcatatcattaaatccgaacaacaaatcccccccctcgcatatgctttttctctctttttcgatttttccgtttttttctatgatcaaacgttataatgcgcatgaaaaaataaccatctgctgatcagatggttaagaaaattatatatcgtataaacactgttctttttgaatgttttctctcatgcgaatcgctttttcataaaaatacgccgcttctttatattgctcatgtgcgcttgtgtaaacggcggcctccaaggcgaaatcttcaatatacacatacagcgatttttcattcatatagtcaaacacttcatggattaaatccatattgagcgactccaaataaagcgcttgtaaaaacttatacttctctaaactgaatcgatcgccccgttctttcgcgatcatgacccctctttcataataggtaagggccgcttggtcatcatgcagcctgaaaagggtgtgcgttaagctgaacagcgccttcggaagctgttcaagctgatgctcttcaaaaacgggaaccgcttttctaaagtaccgggccgcttcatccagatcccgcttttcagaataacaattccccagattgtaaagcgaagacccgatcaggcggggctgtccttcaagcaaagaaaggcggagggcttcgtctaaatgctcaagcgctttgtcgtagtttttgcagtcgatgtagtttcctgagatgacgaaatggcattgaattctccgcactctgtagaaatcgtgtttcatatacgtatccagcgcttgaatcccgtgattcatggaaaaatgagtctgcttcatgacgtaaaacacttcagacatcttgaaatggaattccgccctctctatatcatcctcgacaaatgaaaggagtttttccgctttcctgtaaaaagaaatagccgcaacatagttattgtgatcgaattcatacatccctctgaacaaatggaaataatactcagacagtcccgatatgctgtccgtgctttcgatcgtcttttgcagctcgctgtactgaatctgtgattgttcggtgcattccggcttgacgtaatcaagcataatatgatggcggtagctgatcagctgataatataacagcagcagctggtcttcctccatacgttttatatcctcatcaatttcctctttcagctttatggcatcagccgcttgaaacgctaaaatgtgcttgtaccatttgttgatcttgactccaacttgagatgacggaatctcgtatgcggtcatgcccctttcacaaccttttctaatttctattggttatattttaacatattgtatggctttggaattgcataacttgattgtcctgcatcaaaattcctatcatatatttcggctgtcaccggtattttttgaacagaccgctctcatattgtgaataaaaaagcctgcccttgtccgggcaagcttttcttcatccgcctatataagacatttccactttctttttcccatccgttttagaaagcgcgcggtcaattgaatactgatccgtgcgatttctccagacagaagcgatggattccgtcaattcatcatcggtcagaccgccgcgcacgagtttccgaacatcatagccgcttgacgcaaacaggcacgtaaacagctcgcctctcgccgacaggcgcgctctgttgcaggaggcgcagaatgcatccgagacggaggaaatcacgccgatttcgccggaaccgtcaagatagcggaacctggaagcgacctctcctttataattcgcttctatcggctccgtcggcatgtgctggttgatcagatcaataatctctgccttcgtgatcacatcttttttattccattgattcgtattgcctacatccataaattcaataaaccggagaatatgacccttttctttaaaatagcgggccatcggcaggatatctttttcattgacgcccttttgaacaaccatattgattttaacaccgagtccggccgcttttgccgcctcaatgccctcaagcaccttgttcaccgaaaccccgcggccgttaatggccttaaaccgctcatcctctaaagaatcgaggctgactgtcacgcgatgcagccccgcctgcttcagtttttccgcatacacgggaagcagagagccgtttgtcgtcatcgcgatatctttaagtccggggatgcgcgcaagttttttgatcaattcaggcatatcttttctcatgagcggctctccgcccgtcagcctgattttttcaacgccgaagcggccgacaaacagcttcgcaagccgctcaagctcctcgaaggagagcaattccgtcttttttaaaaatggataatccggtccgaataattcggctggcatacagtacgtgcatctgaagttgcagcggtcggttacagagatacgaagatccctgagcggcctttcccttttgtctgtcacccggcgcgtttctgtattcataagcccaagacccctttctattgttcaacccgttcaggatgtgtgtatacgttaaatgatccgtttctgacaaaacctatcgcggttatgttcagctcttccgccatttgcagcgcgagctccgtcggcgccgattttgaaatgacaatcgacacgccgatttttgcggcttttaataaaacctccgaggaaatccggccgctgaagacgatcagcttgtcacggaccggcattccgtttttcaaacagcagccgtacagcttatccagcgcgttgtggcgcccgatgtccgtcctcatgaagagcagcttttccgtatcgcacagcgccgcattatggacgccgcccgtttcctggaaggtgccgcttcctctttgcatctccttcatcaggcgaaggcacgtctcaggagttatagtgatacggctgacggcggttttggccgttttcacatcctgctgaaagtaaaaatggcggcctttcccgcagcatgaaccgatgaccctcttcgtatagtctttttgctcaagcactccgggattcgtcagttcaacatatgcaaacccgagactttcatctatagtaaagcttttgatttctttttcaaaacgaatgacgccttctgatgcgagaaatccgatgacgagttcctctaaatggtcaggcgtgcagacgagcgtaacaaattcctgtccgttcaccatgacggtcaccggatactctgaaaccatccgatctgccgtctttgttaatacccctttttcatagcggtatatgtctctgaccgctgttgttttttcatccactgttttcccctccgcagtatccttctcttttattcttccacaatccctgtattttgtcgaatttgcggtttaaaaaaagagccctcttaggactctatgtttcattgcgatgatgtctgctcagaatggtgaataaaataactgcggcgataatggccaatatactgacgaatatgaaggcggcaagcttcagaaaaattcccatcagaacaaaaacgactgccgccagcactaatataatgcctgctccttttaacaacagcgttcatctccttttatccgtatcattcccgcggttccgttttctaaacaaaaaagacgccgcgcgggcgtccttttttaacctattcttttgctaaatcctttgcagcgtcttcccaagcctgtttgaactcgtccgcgctgtcagctgagacatatgtgccgcctcccgcttccgccgctttttcaaggctttcgcttcctttcatgccgaagttgaagccgatgatattgacgatcgtgttgacgttcgctttacggagcttttgaatttcggcctgaggattaccgccgcatgtttcttcaccgtctgtgatcagatatacgacgtttttccccgtggcgccggcccgctcaaattcttcacgcgtatcagagagcgctttcgcaatcggtgtccagccggtcggtttaatcttgctgagtgattgctcaaatggagtcacggcgtacggctgaaggccgtataacgtttctgtcgcattacatgatacggctttgcctgagtttttattattgcccttatgcccgaatacccgaagcatcagattcgtgtcttcaggaagaacttccgcaaaagaagtgacagactctttcgcaacatctattttacgctctccccctgttttttgtatcatgcttccgcttgcatcaaacagcacggcaacgtttgtttcttcgtgctttttctcagctgcaaaaacaggtgatccgagtgaaagcgtcaaaagtccgacaatccccgcagtgaacatttttttcatttccttcattcctctccgtttgtttttggccgatgggcccccggctcttctctatgctagatgaggagtatgcaaaaagatatagggcgggattccttttgtataagcgtctgtacaccgttaaaaatgaacagaattatgcgcatcatcctaaaaagattggataaatgatgacagatttaatgcctttttcgccctttttgtaatataagtccgaaaactgattctttttacagttttctcttcatcttttcttgaaatttttgttaaataaaaataaaaaaaagggccgctaaacggcacctttcttattccgctaatgaactcgcttccagggtaaagatgcggttcatatccttttggctgtgagcttcgtaatattttcctccgcccgcaccggcaattgcgtgaagctgtccgttgaagccttctttaaagtcaaagccgatcacgttgactttaatatgatgtttgcgaagttctttcgctgtcttaataggatctcctccgcatgtctcctcaccgtctgtcaacaggtaaacggatttaaagccgaatttatgaacgccgttaaaagaagctttcgcatcctctaatgcttttgcaatcggtgtccaccccgtaggcccgattccgttcagagagttgaggaagctctgtctgtcaaacctttggaatccgtatacaccgcgaatggattcgcaagattgaacttttccggagtttttattattgccttccgaaccgaaaaccgtcattctgacctgtgatgtagacttaattcgatccgcaaaacggacaatttcatcttttgccatattgtatttagaaacgccgtcaatccgtttcgccatactgccgctcgcatcaagcaaaatagcgatattgtttttaaataaaaatgtcttctcgtttgcattctcggcagcaaaagcaggagatgcagcagtcagcatcaatccgagcatgagtatgagtgaaaatgtttttttcattgctttttctccttttcaatagatttacgttcaacgccgaacaatatttatcgtaaatgagatgaaaagggaaataaataggacggcgttcctcattatttttgcgtatattcacatagaagcggcatttttatcagtgatttacacccggcgctcagccttcaatcgacatttgtcagcctttaggctttcgttatatgagtctgttggttgctttaccgtttatggaatagttttcaaaaaaacagacgctcatgaaagcgtctattttttcgccatatatttgtttaaaaatgaatctgcttcggaaatgtccactccctgataataatgcttgacgatgtccgccactgattttccctgctccgccatgtaattggccccgtactggctcatgccgacgccgtggccgaatccttttgtcgtaatggtgatgctgctgccgtttcgtttccattcaaagtcggcagaacggagtccgagtttttcccggatgtctcttcccttcagctttttgccgttgatgacggccgttgccacttgatggcccggcgttctggctgtaatctgtcccaccgtgttttgtcctgagagctgtacgccgagcttttgctgaaactccggcacactgaaggtctgggtggcaagatatttcggcgattgcttatcccacggacttttcacgctttttaaataaggaatggcgcttgtccaataggcttccgcattttccgtatacccgttgctcgtagagaagaaagatgcctcaatcggcttgttatcgtacgttaaaatctttccttgcgtgccggcgaccgcgtttgtgattttcttgaggttgtgtgcgtacttagaaccccattcttttttcagctggcttttgctttgatagacttggaacatttgcgtatcatccaccagtgatcctttcggcgcctggacggctgagtcagcgaccatcagtctgacgatgaatgtccgggcggcgagcgcctgggcttttaaggcctccggtttaaaatctgcaggcatttcggaagccacgacaccgatcacgtactcttcaagcggaatattttctacagaatgattggatgtccgataaaccggaatggatacaggtgattctttcaatgttactgctccttttgtttctcgtgtggtgtgtgctgttttgtgtccgggctctctgtttacggctgctcctttttctgcctgaaacggaaggacgagaatggtggggactagaagaataagtatacacagcccggatagtagaaatacaatcggtttcatatatcagctgcctcctgcttgggattcgactctacttcatcttatgggcagggacaagctaatatgacttccttttggacagaatctttattccatttttcacgcgaaaaacgtattcttttttggaaatcagagcataataatgatgataaaccataaaaaaacagtatgccagattgacatactgtttttacagccattatgcgtttaggtcagttacgacttctttgctttcttgttcagcggccgtttcatcaacgacacgctcgatgtcagcgccgagagccgcaagtttttgatggaaattcacataaccgcgatccaagtgcttcagttccgtgacgcgtgtatgaccttcagccactaatcccgcaagaatcagcgccgcgcccgcacgcaggtccgtagcggcaacttctgcgccttgcagctgtacaggaccgttaatgatcacagaacgtccttcaattttaatgtcgccattcatccggcggaattcttcagcatgcataaaacggttttcaaacacagtttcagtaatcatgcttgttccgctcgcacggagaagcagcgccatcatttgcgactgcatatcagtcgggaatcctgggtgaggcatcgttttaatgtcgatcggcttcagctgggcaggaccgatgacacgaaggccttctccttcatccgtaattttgactcccatttcttccatcttcgcaattaaagacgtaagatgctcaggaaccgcacctttcactaatacatttccttccgtgatagccgcagccaccatgaaagtacccgcctcaatacggtcaggaatgatgttgtgtcttacgccgtgaagcttctcgacaccttcaattttaatggtgcctgtgccggctccgcggatttttccgcccatcgcattgatatagttcgctaagtcaacgatttcaggctcttttgccacgttttcaagcgttgttgttccttcagctaaagcagctgccataatcaagttttctgtcgcacccacacttgggaaatctaaatagatttttgcgccctgcagacggccttctacttctgcttcaataaagccgttgcctactttgatttttgcacccattgcttcaaagccttttaaatgctgatcaatcggtcttgagccgattgcgcagccgcccggaagcgctactcttgaatgacccgtacgggctaacagagggcccataacaagcactgacgcacgcattttgcgcacatattcaaaaggtgcttctgtttctaaagcgtaagaagcgtttacggtaacttcattattctcaaaatgcacatctgctcctaaatgacgcaacacttcattaattgtatatacatcggagagcgtaggtacatcacatattacgcttttttcttcacttgctaataaagatgcagcgataactggtaaaacggcattttttgctccttcaactttcactgtgccgtttaacttctgaccgccgcggacgatgattttttccaaggtattcccctccgcgtccctatattctctatattaatattcagtcgtcacgattggtgtgccaaccgtaacggtatgtttttcgcccattcccgcacttctaagcgcaacttgcacattcatcttatgtttcgatgtcatgatgtaatctgtccacttatatgtaaatgcagaaacagaaacgaaatgaggctcaactacatgttcaactggacttgcttcaaattctttcatgagctgttctgcttttttttgcaaaacaatactcatattatcatttaaatgaccctttagacaagtaaaaataaatactttattttgaaatatgtcatgtgcctgccgttcaaactgttcatatgtatcattccagttttccggttgctccgggctcatttgctcatataataaatacgaagttgggttctggtttttgagggtagtgacgagctgcagtttaaaagttgtgtgattttttttgtcagaatacgtgccgacggtctttacgattttatcttcccgcgcggattcccaatgatattgcggatactgcgtcttcagttcttttaccttgtcatcaaattcactcagtgacaggttcagattttctttcgcatgaagcgtccattcatctacagtgacctgctgccgctccattccttcggcaatctgggcaagcggagacagctcacttgcatgaatggaatgaaataccgctattaaggcgcttaaaaaaacaaaaaataagatgatgcggcctgctctttttttcttcatatcgatctctcccccttactcccatttttgccggagccggggaaagcaatacatggaaaacttcgtcaaaactcgccaagcgggtgaagaaaaattggtttctcacccagcgattcccttcatttcaacagacgaaacatcttaaaataagtatggaagctgtttcgaataggtaagataatctaaaaagaagtcagcgactgccgtaccgatcgcaatggtaagaagaatgatcagcagcctcgcctgcactatttttccttttcggatcagcggatcaaagttgacggcctgaagcgcccaccatgtcaccgcaatgcataccaggtgaaccaggatgctgattgcggcctgctgccccaatacattcacaaatcccatctcctttcattttttccgcccctcatatcctctcttattatataagaagaagagagaaagatgatcatttttacatcagaatttttatccaaaattaggggcaatccccgcttaaatgtccgttctccggcatggtatacttttttggaaaggagatgggaatatgaatcattccttttttcatccggaaaagcagtatggagaaacacttcccgtatttgaccacgagtgggaagcgatagcattctactatgattatagacagtctcaaacagaggaactgaaagaattatgtcagtttttcaacatttctcttgattattcacgcggcagcctgctggaagtggaagctctttacttccgcagcatacaagagctgcttttggcggattggaacctgccgattgacgaatttgagaaaatgctcagtgtgtatgtcatcgattgcgccatcagacaccatgacgatgccgaatgggtcgtcaaaccttatccgtatacggacggcgcctatacgacgggtgtgcggagaggaaacaaaacgtggcacaccgacaactgctgcgaacatttatatctgcaaaaagaagaggatcatccgcttatcggcgtctatgaatctcttatgcgttaatatagaaaaagaatccttctcagacagccgagaaggattcttttttagtttcctgcaacatccaatctgtttacagcccgctgtagcgcaagctcagcccgacgaatgtcagtatcatctgatcgtttgttcaaacggtcttccgcccgctttttcgcagcaagggcgcgctctttatcaatgctttccgctgtttcagcggcttgtgcaaggatagtgacctgatcaggacggacttctaaaaatccgccgctgacagccgccaattcggtctgcccgtcttttttaaggcggacagcgccgattttaagcggagccacggtcggaatatggccaggcaagataccgagatcaccgctctcggctcttacacttaccatttcaatatcagcatcatatactgggccgtcgggagtaacgatattgactttaacggtcttcatgcttttaccctcctaggaccagattaaacttctacacccatctcttttgcattctcaatgacttcttcaatgcgtcccacaagacggaatgcatcttccggaagatggtcatatttaccggaaaggatttctttaaagcctcgtaccgtttctttaacaggcacgtaagaacccttttgtcccgtaaactgctcagctacgtggaagttttgagaaaggaagaactggatacggcgtgcgcggtgaacgacaagcttgtcttcttcacctaattcgtccataccgagaatcgcgataatatcctgaagttctttgtaacgctgaagcgttgactggacttcacgcgccaccgcataatgctcttctccgacaatttccggagcaagcgcgcgggaagtggaagccagcggatcaaccgcagggtagatacccatttcagttaatttacgctcaaggttagtcgtcgcatccaagtgagcgaacgttgtcgccggagccgggtcagtatagtcatcggcaggcacgtagatcgcctggatagatgtaactgaaccaacgtttgtagacgtaatacgctcttgaagctgacccatttctgtcgcaagcgtcggctgataaccaaccgcagaaggcatacggccgagaagcgcggaaacctctgaacccgcttgtgtgaaacggaaaatgttatcgataaagaacagtacgtcctgtccttgtttatcacggaaatgctcagccattgttagacccgtcagtgctacacgcatacgtgcgcccggcggctcgttcatttgtccgaagaccatggctgttttcttgataacgcctgaatcgctcatttcgtagaaaaggtcgttcccctcacgagtacgctctcctacaccggcgaatacggaaataccgccgtgctcttgcgcgatgttgttgattaattcctggattaatacggttttacctacgccggcgccgccgaacaatccgattttaccgcccttgatgtaaggagcgagcaggtcaacaaccttaattcccgtttcaagaatttcaacctcagttgaaagctcatcgaatgaaggagctgatctgtggatcgggtccttttgagcatccgcaggcagcggttcatttaaatcaattttatctcccagtacgttaaatacgcgtccgagagtcacatcaccgacaggaacggaaatcggcgcacctgtatcaacagcttccattccgcgctgaattccgtccgtagatgccatggcaattgtacggactgtatcatcgcctaaatgaagagcaacctctagcgttaggtcgatgcctacttcattttcgcctgtagctggctgtgaaactttaatcgcattataaatcgcaggcaagtggccgtcctcgaaacgtacgtcgacaaccggtccaagcacctgacttacgcgtcctttcttcatcgctatccctcctgacaaaatctttctattctaaagcggctgcaccgccgacaatttcggtaatttcttgtgtaatcgccgcttgacgcgcgcggttatatgaaagcgaaagtgaatcaatgagttctttcgcattatcagtcgcatttttcattgctgtcattctcgcagcgtgttcacttgctttactgtcaagaagcgcgccgtaaattaagctttccgcatattgaggaagcagcacttcgagcacctcttcttcatccggttcgaactcgtaagaagccgtgcgcttcccgccgctcgttccgaaatccgttaaaggcagcacttttttctccgtcacttcctgtgaaatcgcactgacgaaatggttatacaccaaatgcagttcatcaaaagcgccgtcgataaacatttgaaccgtctgacgggtcaaatctttaatctgagcaaaagtgacctcgtcgccaagccccactaactcagacataatcggcatttcccgttttttgaagaaatcgcggccgactctgccgattgcaatcaccgtgtattcatctttagactgatggcgttcttgaatggtgcggtaagcgtttcgcaaaaccgaactgttaaacgcacccgcaagcccgcggtcagacgtaatgacgagatacgccgtctttttcacttctcttgagacaagcatcgggtgtttcgcgtttttcgcgccttttccgacgttaaacacaacctcctggatcttatccatatacggagcaaatgacttcgcgttggtttccgcacggttcagcttcgcagcggataccatctgcatggcttttgtaatctggcttgtttttttcgttgacgtgatccttgacttaatatcgcgtaatgaggccaaagatttcaccacctttattcttcatttgcgtaaaaagagagaaaaagagaacctttttctctcatcttctaagggttagttgcttggtgcaaatgtgcgtttgaagccttcgattgcagctttgaagtcttcatcagcaggaaggtttcctgttttcgcaatgccgtcaagcagatctttatggttttgatcaaggtacatgtagtactcttcttcaaaacgtctgatatccgcaaccggaatatcatcaagatatccttttgtcagcgcataaagaatggctacctgtttttcaaccggaagcggtttattcaagtcttgcttcagcacttcaactgtacgcgcaccgcggttcagtttcgcctgagtcgcctggtcaagatcagatccgaattgggcgaacgcttcaagttcacggtatgaagccaggtcaagacgcaatgttcccgctacctttttcatcgctttgatttgggctgatccgccgacacgggaaacggataatccggcattgatcgcaggacgcacgcctgagaagaataggtcggattgaaggaaaatctgtccgtcagtaatggaaatgacgtttgtcgggatataagcggagatatctcctgcttgtgtttcgacgaacggcagcgccgtaattgatcctgcaccttttgcgtcactcagcttggctgcgcgctcaagcagacgggagtgaagatagaatacatccccagggaatgcttcacggcccggcggacggcgaagaagcaatgacagctcacggtaagcggccgcttgtttggataaatcatcatatacgacgagaacgtgcttgccgttgtacatgaattcttcacccattgtcacccctgcatacggtgcaaggtacagaagcggagccggctgtgaagcggacgccgtcacgacaatcgtgtaatcaagcgcgccatgcttacgaagtgtttccactacgccgcgcactgtagattctttctggccgatcgctacgtacacacagatcatgtcttgatctttttggtttaagattgtatcaatcgcaacagatgttttacctgtctgacggtcaccgataatcagctcacgctgtccgcggccgatcggaattaacgcgtcgatcgctttgatacccgtttgcagcggctcatgtaccgatttacggtccattacgcctggagcctggctttcgatcggacgtgttttgcttgtcagaatcggacccagtccgtctaccggctgtccgagcgggttgacgatacgtccgattaattcttcacctacaggaacttccatgatgcggcccgttcttttgacctcatcaccttcacggatatctctgtaaggtcctaagataacgatacctacgttggattcttcaaggttttgagccatacccaaaacgccgtttgaaaactcaacaagttcaccggccatacaattgtcaaggccgtgcacacgcgcaataccgtctccgacttggatgactgtacctacgtcatgaacttcaatttcagattggtaattttgaatttgctgctttatcagcgtgctaatctcttcagctttgatgctcacttaggtttcaccccttctatcgatttcctccggcaagttgacgttccatgcgctcaagctttccgcttacgcttccgtcataaatccggtttccaatgcggactttaatgccgcctattaaatccgtctgcacttcatttctgattctgagcgaagcgattccggctttttttgcaaacacttgagacaatgataacatttccgcttctgacagcggttttactgaataaacaaccgcgtcctctgtctgacgagcctgattggcaagtttgataaactcgtctgtgagatcaggcacaatcgaagaccggcggcggtcaatcagaagaaaaatcgtatgcagcacagactcagacagtgcgccgaacgattgctgaatcagctcttttttcttagcggccgataccttcggatggcttaacacttcctgtaatccggcttcgttccggaacacttcttttagtacggtaagctcttcttcgatttcattgatttgagaagtctcaacggcaatgtcgaaaagcgctgacgcgtatcgtttagagacagcagatccactcatcggctttctcctacctctttaagatagtcctgaatcagttgttcctgggcttgttcatcaagctctttttcaatcactttcgatgcgattaagacagatagtgatgcgacttgctcgcgaagtgcggaaaccgcttgttctttttctttgacaatttcggttctcgccgcttctttcaatctttcagactcggcgcgtgcagcctggataatgtcttccttctgcttttcacccagttttttcgcattttcaatgagtgattgtgattcctgtttcgcttcttttaaaagaacgcgctgctcttcaatcagcttctgcgcttctttatttctttcttcagcggacgtaatttcgccggcgatatgatcttcacgctgtttcattatatttaatagcggtccaagagcgaatttcttgagaagcgctaataaaactaacatagctaacaattggaataggatatctccgccgttaaacgacagtcctaattcaagaggtaattgagacatctactacggcaactcccttctgcaggttttctctgctgataaaaagccgtttcgggacggcgtgcttatcagacataaagcaatggcgaaggttctcttagagtgatcttcgccatttttagttcatataaggcttttttgcttagccaaagaacgctaagaacgcgataacgacagcgataatcggaagggcctcaaccaatgcgatacccatgaacataagagttctaagttcttttcctgcttccggctgacgggcgattccctctaccgtacgtgaaacgatcagaccgttaccaatacctgcaccaagtgcacctaaaccgattgcaattgcagctgctattaaattcatgaaaaagttcctcctttaaaatgttatccgaatggatatatgattttaatgatcatgactgattttgtgtgacatgtacaccatcgtcagcatcgtaaagataaatgcctggatggtaccgatgaacaagctgaacgcctgccatgcaagcatcggaagaatggctccgactgtgccgaccaaaccgagaaagaagctgtttgagtagaaattcgtcgccagattcgcaagcaggccaagaagaatttccccggcgaaaatgttaccgtaaagacgaagtccgagtgtcagcgtattcgcaaactcctcaatgatcttcatcgggaacataagcggaaccggtctgaggtaatccttagagtattccttcaaacctttcatcttcacgccgtaatagtgcgttaacgacacaaccataacggctagagtcagagtaatagccggatcggccgtcggtgatttccaccaaagctcgtgtccgaccgttacagaaaacggcagccccagcatatttgatacaaatatgtacatcagcaaggttacaccaagcgccaagaagttagcccctgtttttaaatccattgtactgcctataatattgcggacaaaatcaacaatccattccatgaagttctgggcttttcccggacggatggacagcgttctcgtagtgagaatcgcaatcagcagcacaatcacacttgccacagtaatcatcagaatgtttgtcagattaaaagtaagaccaaacaaatcaatagttctgtaatcgtgattcaatgggttttcacctctcttccattgatgaacgtttgagctgaataatggaatctatcataatgacgggataaattgtcattaatccaataatcacacttgccacactgactttatcgggatatttaaaggcgacagccatcgcaagtatcgcattgcaccaacgcgctgcgctcccgagtgatcgtatggactttcctttcgccacggccttgtcaaaagcattcattcttctggtcaagagccacaaattaaacaaactgaaaacagttcccaaaaagaggcctaaaaaaacagttttatacgccgtaagaccatatcccagcaaatagattgctaagattacaaatacatatctccgttgtctgctgaatgtaagattgggatcgtccatcaactatctgtctcctgatgaaaatgtaatataattcctggatacggcaaaacatgcggttaacccttgcagaaggccttttttgtccgcaaaacggcctgttcgaaaaaaccactcatcctcctgatgccacgggatgctgtttcattcgcttagataaatcctcatataacgggtttttttggaggatttaaaatgaggatggatactagaaatgaaaggaatgaaaaccttctcataataccctcgtttagcatacaatagcccctaacatgtgtcaatctgtttaaagttaaaaaactttttataccgggagcatacacagaatgttcacaatttcacctataaatgtatgaactctgcccattcagcaaatatctggataaaaaaagaaaacccctgaatgaggttttccgatttatttggttccgtacagtcggtcacccgcgtcaccgaggcccggaacgatatagcctttttcattcagtttttcatcaagggcggcgatgtaaatatcaacatcagaatggtgtttctgcagttcttccacgccttccggagccgctacaagacacataaaacgaatgtttctcgcgccgcgctttttcaggctgtttatcgcttccaccgcagaaccccccgtagcaagcatcggatccacgacaataaattcgcgttcttctatatcagaaggaagcttgacatagtattccaccggttttaaggtttccggatcacggtataatccgacatgccccactttagcggccgggattaatttcagcatgccgtcaaccattccgagacccgctctcaggatcggcacgataccgagtttcttccctgaaatcactttggatgtcgctgtttgaacaggtgttttcacttccacttctttaagaggaagatcacgtgtaatttcaaacgccatcagtgatgcgacttcgtccacaaggtctctgaaatcctttgtgcctgtattttcattccgaatatatgtcagtttatgctggattaaaggatgatcaaatacgtaaacctttcccatactgtgttcagctccttttttgttgtccgagtgactttttcacacttctattgattctacagaaaaagacaaacagtttcaagaaaatcataaaaaaacccgccggattaaggttccggcgggtttcttccttattaatagtccagttctttatataaaggaaacttttcagtcaagacagatacgcgctgtctcgcttcttcaagttttgcttcgtcttcatgatgtttcagcgcgaggccgatgatggcgccgacttcttcaagcgcgtcaccgtcaaagccgcggcttgtcacagctgccgtaccgagacggattccgcttgtgacgaacggtttttccggatcgtaagggatcgcgtttttattagatgtaatgccgatttcatcaagaacgtgttcagcgacttttccggtcagtccgagagaacggaggtcgacaagcacaaggtggttatccgttccgcctgatacgagctgaatgccctctttgttcagagactcagccaggcgcttcgcgttcgagatgacgttttgcgcatacgttttgaaatcatcttcaagcacttctccgaaagaaacggctttggccgcgatgacatgcataagcggtccgccttggattcccgggaaaatggatttatcaatctttttgccgaactcttcacggcaaaggatcattcctccgcgggggccgcgaagtgttttgtgagtcgttgtcgttacaaagtcagcgtaaggaaccggattcggatgaagaccggctgcgacaagacccgcgatatgcgccatgtctaccatgaagtaagcgccgacttcatcagcgatttcgcggaattttttaaagtcgatcgtgcgggggtacgcgctcgctccggcaacgatgagtttcggcttatgcgccagcgctttttcacgcacatcttcataatctatatattgcgtgtctttatcgacaccgtattctacaaagttgtattgaacgccgctgaaattaaccgggcttccgtgtgttaagtggccgccgtgggagaggttcatcccgagcaccgtgtcgccgtgctctaaaatcgtgaagtaaacagccatgttcgcctgagcgcctgagtgcggctgaacgtttacatgctcagctccgaaaatctctttcgcgcggtcgcgggcgatgtcctcaacgacatcaacatgctcacagccgccgtagtagcgtttgccggggtagccttcagcatatttgtttgttaaaacagagccttgcgcttccattaccgcttccgtcacgaagttttcagaagcaattaattcgatcttagtctgttgacgcttacgctcatctttgatggcgttaaacacttgtttgtcttgtacaggtaaatgtttcatcagcgagatcctctcctatccgtttcctgttctttatttttaccacccttattgtacatggtttttcaggtgaatgtaacagcttatttaaaaaaatcacaaaatttaattagaaaacacgaacattatacaggaaaagtattttcatcattcgcattcataaacggcgcgaattccgcctatcagcttcggccttgtccgggccatcgtcacatgtgcttctccaagctcacggcttgatatccggacagggacggcaacgggtttcagatgcatgccgatgaacgtatcgccgatgtcaatcccggcatcagcctgaattgattcggcgagcacgggagaacgcatctgccggtatgcataagaggccattgctccgcccgctttcgggacggggacggctgaaacaatggggagcctgaaccgctcggccgtttccgcttcaatgacaagcgccctgtttaaatgctcgcagcattgaaaagcaagatgcacacccgttttttccttaaaccggttaagtccgccgtatatcaattcagcccaatccccgcttccggcggtgccgatccggcttccggcggcttcacttgtactgcacccgatcaccagcagactgccgtccgtcagtcctgcctgctcttgaaactcagtcagcatgtccgtccatttttgcttcatctcttccattgtccagcacctcttacagatttttttcttcgtaatctgcgattttgccgatccgccgttcgtggcggccgcccgtaaattcagtcgtcagccagacttttgcgatttcgcgcgccagccccgggccgatgacgcgttcgcccatcgcaagaacattcgtgtcattgtgttcacgcgtcgcttttgcgctgaaggtgtcatgggcaagcgcacagcgtatgccctttaccttatttgcggagatgctcatgccgatgcctgtgccgcaaattaaaattcccctgtcagcttcgccgttcaccactttttccgctaccggaaaagcgtagtctgaataatcgacagagccggcgccgcattcacagcccatatcaatgtattcaatctgcaattcatccaaaagactttttatttcttcgcggatatggacgccgccgtgatctgacgcaatagctactttcattcatttacctcctaggtgtggctgggcgaagacagcccagtgtgcttgtcctttttattacgaaatccgttgatttcattctactctttcacattcgttttgcaaatgacctgtttgcagattttctgacagattacttgctttttccgtcaagcaattgatcagccaaaagggtcagcagctcctccagttcgtcccgcgtctgtttataaacatcaagcggaccgccgaacgggtcagagatatcgccgttttcccccgttacgtattctttaatggtaaagactttgccctgactgttttgatatcggccttcaatcagctgtttgtgctgttccgtcatcgccagcaccagatcagccgtctcgatatgttcttccgataagggagatgaactgtgattgagagcgatccgtttttcaaacagcgcttctacggcatgggccgacgcttttccgtgcggagacgcgaatacgccggccgaacttacgctgacgtccagccctttcgtttctgcaatggatttaaaaagagcctcagccataggactgcggcacgtattgcctgtacatacaaagattattttcatgtccgtcacctcttactgcctattataaatgaagaaaaaagaaacggcatcttcgtttctttttttacgtatcttatatcggtaaaagcagtttcaatccgaatccgatcaaaatggctccgccgagcgcttcgctgtaggagccgagccacgactgcacctttcttcccgccaaaaggcccgcccatgttaaaacggtgctgaagaccccgaacagcgtaacggccagaaacgggttggaaccgttcatcccgagactgagcccgacagaaaagctgtccagactgacaccgaccgcaaacagcaacagtcccgagcctgccggagatatgagcggcccgtctgattgtttaaacgcggcgatgatcatctgcacccctaaaatgaaaagaagagatccgccgatgtaaacggcaagcatccccagaaaaccggacagcagatgcccggccgccattcccgcaagcggcatcatgacatgaaacagcccgatgacaacccctatatgaaaaatctgttttttcttcagctgaatcattcccattccgagcccgacggaaaaggcatccgtccccaaagcaaatgccatgatgcttaaggagacaagttccccgatgaatagattcgacatgaaataaaaacccccttggacgtgcccgcttgtttagcttatgcatgtccgataaggggtagaacaagttaatggataacggtgccgcctgcggctttcatcagcctgttcatcacggcgagccccactccggtatccggaaaggactcagaaataatcatgtccacttccgcttcatcaaagctgcggagcgcatcgtataaggcggacgccactgtttcaaggtcggcgcgtctgccgcagaccttgatataatcagcctggtaactatcggcgttctcttctgttgtcaaaatgccgattcgtttcccccggcttttatatgcgtctgccagttcttgaattctccgggcgccgccgtcggcaatagccatcggcgcagaaggcgcgtaatgtgtatatttcataccgggagaaataggaacctcatcttcttcggtcagccctttatccacaagaaccgaaccggcggcggattcaatctgctcttttgtcacgccgcccggacgaagcagcacgggctgtttccccgtacaggacagaacggttgattccactccgattcccgtcgcgccgccgtccacaataccggcaatgcggccgtttaaatcatgagctacatgctcggccttcgtcgggctcggttttcctgataaattggcgctcggcgcggcgatcggcagtccggccgagctgatgagggctaatgctgccggatgatcaggcattctgaccgctaccgtctcaagtcccgcggtgacacggggtgacagcacaccgggcttacacggcagaacaagggtcagcgcccccggccagaatagcttcatcagctttttcgccgtctcaggaatatggctgataaaacgatcaagctggctgatatgggatatatgcacaatcagcgggttatcgctcggccttcctttcgcctcatatattttcgttacggcttccgtattttcagcgttagcgcccagtccgtaaacggtttctgtcggaaaagccacaacctcattctgccgcagcaattccgcggcttgtgtaatctggggattggttgtggataattctgcggaacaatccacaaaccatcttcttgttttcatgtataaccaaactccttattttaaagcggtaaaactttatttgctctcgtgtattccttttgaaagtataaaagatgtcctttaataaaacaagtgttatccacaaactgtggacaacactttttaataagtggataaccttgtgtataagttagatcaggcagaggttttcaccattaaaaacgaaccttttgtgcataacgagttgcggaaatgttcggacgtatacagttcatcaggcgcatcggcgcacgcttcaaatcccatcacattcagaaactcagcagatgagggctgattggcgactaagtagacatcttgaatctcatgttttttgcacagcacatccatactttgaaacagtgtaacgatatggctttgattcagcctgtccgacatgacgagtgaacggagaagcccttttccgccgctgaatttttcgatcccgagacaggcggcaatcattttttcgctgtcttccagtacgataaaccggctgatctgctgatcgatttccgcatgtgccgtatcagcctttttcaaaaaggcctccagcgcctccgtatcttgatctcttgccactctcagctgataaaacatatatttccctccgtttcgatcaactctttcttccaatctatgaatcgaatccggatttatgccttttacttcaggaaaatagatctgaaatccaatcgacgaggaaaaacttcacttcggtatcatcgtcatctttattttctttcttcgctttatcagcctttgcttttacgtcatccagcacttttttagtctgtttctgcgtttcttcctgcttctgtccgccctcttcctgatctttcaccgcttcgccgtttgagaaatcaaggaagcacagcggcggaaacaagacgcaccaccagttggcgccctcgccattgccgagtgtaattaaaatcgcttcatattttccggccggatagaccatattgccgtaaagctttgtcggaaacgaaattttattgaattgaactgaaacggattgatgcgcacccttttctttcatcgtctgtttggcgatttctttaatttcaggaagcttcgaacgaatgagccgccgcgcttcttcaatggaagtgatatctttcacccagtccgtgatttgcttgtttacagcatctctgatctggcgcttgagcttttgatcctcatcgttatcactgttggccaaaattctgagccggatcgcttcatccggtatgacgacgggctcatcggctgatgcccgcgccgtttcttcttttgtcaaacccgcaagcgctcctgataataaaagaaaaatatatatgcagatcatcattgtctgtttcatcggtccccaccgttcctctccgtgctttttttatctagtcccattatggacatgacggaaaaggtttaaaccggcgggaagaaaaaaatctagcaagctgataatctgcattgacagattcaaaatatggtacgatattattttgataggaggttttcagatgaaatataattacaccgtgctgctgtcggcggcatgtatgtctgtcatttattctattttgtatgttcatcaatttattatcgcggctttcatttcgatggcgttttattttttgtttccttatttgatttttgcgctgccgcttcaatactttctgaataaaaagccgaagagatttcatccgctgtattttctttattatttaggggtgtcattcattgcaaacgggattatcttcggtcttttgcagccgtcaggccaatctctgttttctaattcagccttttatatctttgcggttttaacagccgtcgtctactgggtatgggattccgtattgctgcaaagacaaaatccggctgcagaagcgtaatcagcagacagccggctgaagggagagcggcgcaaaagaaaacggcggccatctttaaacgggcgtgccgtccttcttctgtttcagaatgataattggcccgctgctccccgcttacggccaacccggaaacgatgatcgctgtgacgataagaacagccgtaacggcgccgaaaatgatgtcaacgccaaacggcagaacaacccccgccgcataagctgcggcggcgagtatacatccgaaggcgaacgcttttttcaaggcggatgcccctttcattttctttccattgtaacaaaagcccgccgtgtgcgtcaccggcgggcttttttcatgatgtgatgaccgcggatacggttctgtcttttccgttgatgtcctgtacgacttccacttccgcattcggaaaggaatgacggaacaggtctttcacggctttcccctgattatatccgatttcaaagacgacaagcgctttatctttcatgacaagaggcagctcctccataaaccgcttgtagaatttcaaaccgtcaccgccgtccgtaagtgcatgaagcggctcatggaaacggacgatatccgacaaatccgccatttcttcttcagaaatatacggcggattggaaacaataatatccgcttttttccctgatgaaataaaaggagttaacaaatctccctgcaaaaaacagacgtccgctccgaggttttgcgcatttctttccgccacctgcagcgcttcttttgaaatatccgaagccgatactgaaaaatgtccgcattcaagggcgagcgtcaccgcaatggcaccgctccccgtaccgatatcaatgacgttcagtcgttctgccccggaaaatacccgcttttgtctgtccagcagatgaaagacgacttcttccgtttccggacgcggaatgagaacatcgtcattcacaaaaaattccctgccgtaaaactgttctttcccgataatatattgaatcggaataccttctttatgcatctccacgtgccgcctgaatcgataaagctcgtcctcgccgacgggctcctgcagacttgcgagaagcttgctccgatccattccggtatcatttaacagcagcagctcggccgcgtttttttctcttcccgcttcggttaaataagaagaagcccagcttagggcttcaaaaacggtcttcatcttaattttccgcctgctggagcttgcttgactggtcttctacgattaacgcttcaaccacttcatcaagcttgccttccaggatttgatccagcttttgaatcgtcaggccgatgcggtgatccgtcacacggttttgcgggaaattgtatgtgcggatacgctcggaacggtcgcctgaaccgacggctgatttacgggtctgatcatattcagcctgagcttcctgctggaatttgtcatagattctggcgcggagcaccttcatcgctttttctttgtttttaatctgagatttttcatcctgacaggaaacgacgacaccggtcggtaaatgcgtcaggcgtacggccgacatcgtcgtgtttacgctttgtccgcccggtccgcttgatgcgaatgtatcgacgcggatatctttttcgtggatgtccacttctacttcttccgcttcaggaagacacgccaccgtcgccgtggatgtatgaatacggccgcctgattccgtttccggaacacgctgtacgcggtgcgcgccattttcatacttcagcttggagtatgcgccttttcccgtaatcataaagatgatttctttgtaaccgcccgttccggtcacgtttgcttccatgacttcagtcttccagccttggatttcggcgtaacgggagtacattctgtagagatttcccgcaaacagcgcggcttcttctcctcccgctgctccgcggatctccatgattacgtttttgtcatcgttcgggtctttcgggatgaggagcactttcaaacgctctgataaggtttccgtctctccctgcagttcggagatttcttccttcaccatttctctcatatcggcatcaagcttttcctcaagcatcgctttcgcatcggcaagctgttctgatgcgtctctgtattgtctatagacttcaacggtttcttgtatatcagattgctctttcgaatattctctaagctttttcggatcgttgaccacttccggatcacttaaaagctcatttaatttttcgtatcgttgttcaattgactgtaaacggtctaacacggtcttcacctctgttttcctgtgcgtaacattctcattatagtatagggcttatcgccagtcaaaagcaattcgcctctgttatactgaagcaaaaaaggaggggcggatatgctgaaatccatccaccatatagcaatcatatgctctgattatgaaaagtcgaaagctttttacaccgagattctcggtttcggcattataaaagaaacataccgaaaggaacgggaatcttataaacttgatctggcgctggacggcgcgtacgcgattgaattgttttcctttcccgatccgcccgaacggccgaccagaccggaagccgcgggtctccggcatctcgctttcaccgtaaacgatcttgaagcagccgtcagggagttaaaggaaaagggcgtcggcacagaaccgatcagaaccgatccgctgacggggaaacggtttacctttttctttgatcccgacaagcttccgcttgaattgtatgaagcgtaacgttttttgaagaaatgccgctttctttggcgaattccttcttgttttgtctaacatgaagggaacgccgcctcatggtcgaatacctagcaaaaaggaggtatgtgatcatgaatacaaacatggccgcgaaagagctcggcgtctccgcaaaaacggtgcaaaggtgggtcaagcagctgaatcttccggctgaacggaatgagctcggacattattcctttacacctgaggatcttgatgtgctgaaatcggtcaaacggcaaatttctgaaggcactgcccttctggacgttcaagtgccccggcagccgaaaaaacggacgggcttcattttgcagcgtccgaaaatcaatggcggcgctgaacaaagattggcagagctggagcgcaaactggacattctcacgaaagagaaacaaggtgagaaccatctgctttcaaggatagaggagcttgaacgccagctgaaacaaaaggcagatgaaggggtgtcttatcagcttcttcagcacaggcgggaaattgacgacctcaataccgaattgcagacattggcctcccgcatccaggaacttgcccagacagctcccctctcagaaacagccgcttcttcagaacataagaaacccagaaaaaaaacgagattttcgccctttaaatttcaattctaatcaaaaaagctccctgaaacagggagcttttgattatgcagtcagcgcaatgatgatcggcagtgagatgagagataaaatcgcactgatcacgaacgcggacgcagtttcttcctcttgtttttcgaaacgtgtggcaatcatcgccgctaccgcagatccagggaatgcaacgagcaataccgctttagtgatctggtcagccggaagtccgactgcaagagcgatcaagtacatcagcgcaggctgaacggcaacttttaacaaagcgataccgaaagccggcagactgagcttaatgttgcggataccgacagttacaccgacggcgaagagcgcaacacctgatgttgtgcttccgagctgatcaagcattttttctcccaagccagggagtgttacaccgcagagtaccagaatgatactgataagcggtgcagccgcaagcggttcggaaagaccgtgaagaatagacttaccagtcattttccagaagttctcgttttcagtgtcttttttcttagatgactcaccgacagtagcgataatgatcgctagcgggtcaaggatggcgttaaccacgatacccgtaacggcgataggaatcgctacttcgcttgctccgaataagcttccgagtacgggaatacccataaaagcaaatgtcggctgtgcagagtttaaagaaaatacagatgaattcgttaaatcatacttgaagataaatttgcaaaccaacaaaatgacgataaagaatccgacaatcccaatgatcaaagcgaccatcaaaggaacctgtgataaaaacgcacttcttgaagtggttaaaatacttgcgataaaatgcgccggaagcgcgtacttcgtaactaaggtgcttaccccttttgctgacttcgcgtcataacttccgaagcgacctgcgaaccatcccagcacgatcacgaaaaagatcggcgccaggaggattaaaatatctaagaagctcaaaatgttctcctccaaatccttaatgtccgtatactttagcctttatataaaagctttccctcggactgtaaaattaatcgtaaaaattatttagcgacaacttgtttatattgcggtttccacattgcatcaagaacggcttgttctacattttcaggaatgcggtttgccacgccttctttaatggcagtttccgctacggcgatcgcaactttaattgaaacttcttgtaagtcgctcatgctcggcagaaggcctgcacccggtgtttcaaaatcaacgctttctgcgattgcgtcagcagttgccgcaaacattgcaggagtaatcactttcgcttctacaacgattgaaccgagaccaagtccagggaacgcgaatgcgttgttagattgtccgatttcatgagaaacgccattgtactctacattgtcaaacgggcttcctgtcgccacaagcactttgccgtcagtccatttgaaaagatcgctaggaacggcttcagcaagcggtgtcgggttagacatcggcatgatgaccggacgctcaacgtgttttgccatttctttgacgatttcttcactgaacgcgccgctttggcctgatgtaccgattaagattgtcggtttcgcttgacggatcacttcaatgaaaggaatttgtccattttcatcgcgtttccaatctttaatttcttcagctgtgcgcaggtacggctcttggaaatcaagaatgttttccataccttcaattaacaagcctctgtagtccattgtgtagaacgctttgttggcttcttcttcagaaagaccggcaagcaccatagtgtcgcggatttggtcagcgattccgattccggcagatcccgcaccgaagacaaccacacgctggtctttaatagacgcgcctgttttcttcatagccgcaagcacacctgcaagcgtaatcgcgcctgttccttgaatgtcatcgttgaatgtaagaatttcatggttgtatttcttcatgatattgcgcgcgtttttgtttccaaggtcttcccagtgaagaagagctttagggaaatatttaagcgcagcttttacataagcgtcaacgaaagcttcgtaacgttcgccttggatacgttcatggcggttaccgatgtataaaggatcgttcagaagtttttcattgttcgtaccgacgtcaagaacgacaggaataacacggcttgggtcaataccggcagcagctgtgtataccgctaatttaccgatggcgatgttgataccgcccacaccccagtcaccgattccgaggatgctttctgagtctgtcgcaacgatcagatcaatatctccggcagtggcatgaaggttttcaaatgcctcttcgattccttccacgttgtcgatagaaaggtaaatcccttgaggtcttctgtactcatggctgtattcttgaatcgcttcaccgacagtcggtgtgtaaacaaccggcagcatttcacgaagatggttttgaagcaatttaaagaaaagaacttcgttacggttttgcaaatcattcaaatacacgttttggcgaaggcggtccggctgagcttgaaactgctcgtatgcgcgttttgcctgctcatcaagagacagaattgtcggaggaagcagcccgtctaatccaaggctttttctttcttctgctgaaaacgcaacacctttatttaaagtagggatagatagaacttcttttcctcttaaagtagtttctaagttgccttccttcgttactttaatattattcaagaaaatctccttctttcttcaaatagttaacaaagttaagtaattacccattttggctagtgtgatcgcgatctgctatatctttttttgacaattattcgaacaatgtctcataactatttacattacttagtcattttatgcctgtaaaaatgaaaattcaagagatgaaaattacttaattttttcatactcttttttaagttatttaactacaatttttgaaaaaacgtcaaaaaaacaccggattttttaccgatgttttcatgaaaagggttatttatcagtctgtttttttcggcacttcgtgatgatgtctgcatctcgcttcgtatgactccgacgcgccgactaaaatgaccggatcatcataggaagcgggcttcccgtcaatcaaacgctgcgtacggcttgccggcgacccgcaaacggagcagaccgcctgcagcttcgtcaccgattcggcaaccgccatcagattcggcaccacgccgaaaggctctccccggaaatccatatcaagtccggcagcgatgacacgatagcctttatccgcaagcgaggataagtcgccgatgatcgattcgccgaaaaactgcacctcatctaccgcgatgacgtccgtgctttcactgatatgatcccatatttcagccgaagacgagatgacgtggcttgtcatggatgtgccgttgtgagaaacgacggcctcctcactgtagcgattatcaatggcaggtttgaacaccttgacctcctgcttcgcatatgtcgctcttttcactctgcggatcagctcttctgatttcccagagaacatgctgccgcatatcagctcaagccatccgctttgcttcattatgtacataggctatccgctcccctttttttcctgtttatggacataaaaaacaggcaagaagcaattcttgcctgcctgtaaaatctattattacttaagaccgtattttttgttaaagcgatcaacacgaccatcagcagaagcgaatttttgacgtccagtgtagaatgggtggcattcagagcaaatctcaacgcgtacctcttcttttactgagcctgtttcaaattcatttccgcaagcgcatttaactgttgcttttttgaaattaggatgaattcctgctttcattgtatccatctccttccgccctgaatcccgtgtggaaacagagttattattccggagtaatccggaacgcatatgagagaattatatcagtcatttactgcatttgcaaatacattttttatcagcggcgagctgatgatgaaaggtttgcctgcttccattcttggttgatcagatcgaagaattcctgattcgtttttgtttttttcatttttctcataaacttctctgcgaagtccggagaatcagacatcgatttgcggatcgcccataaacggtcaagatgctctttcggcacgagcagctcttccttccgtgtgccggagcggcggatatcgatcgccgggaaaatccgtctttccgcaagagaacggtcaaggtgaagctccatgttgcccgttcctttaaactcttcatagatgacgtcatccatccgggagcccgtgtccacgagcgccgtcgccaaaatggtcaggctgccgccctcttcaatgtttcgcgcggcaccgaaaaagcgcttcggacgatggaacgcagccgggtcaatcccgccggaaagcgtacgtccgcttggcgggataacgaggttgtaggcccgtgccaggcgggtaatgctgtccatcagaatgataacgtcttttttgtgttcaacgagacgcatcgcccgttcaagcacaagctccgctaccttaatgtgattttccggcacttcatcgaacgtcgagctgacgacatcgcccgctacggaacgttcaatatccgttacttcttccggtctttcatcaattaagagaacgatcaattcagcgtcaggttgatttgtcgtaatgctgttagcgatttcttttaacagcatggttttaccggctttcggcggcgccacgatcagaccgcgctggccgaaacccacgggagccatcatatcaagaattcttgttgagagataattcggtttcgtctcaagcaccatttggcggtccggataaagcggagtcagcgcaggaaaatggacgcgctctttcgcagattccggatcatctccatttaccgcttcaacgtgcaaaagtccgtaatagcgttcgttttctttcggcggacgcaccttgccggatactttgtcaccgtttcttaaatcaaagcggcggatctgagaagcagaaatgtagatgtcttctgagcttggcgagtaattaatcggtctgaggaagccgaatccttccgattggatgatttcaagcacgccttccataaacagaagatcctcctgctcggcgttggctttcagaatggcaaagattaattcttttttagtcagtttgctgtagtaggagattttataatgtctggccagttcatatagttcttttaatttcatattttccaaagaggaaatagatacgtctttcataaaaacaccacgcttttcatagtcaatgtattgctgttttcattcaaatcggctgcttcgcatgattccgccaaagcacattcttttataaaacgttcaggaacttctatcggtaacacttccacccatgatcggcgcttttttaaaaaaggaatgtcttaatgagttttgaaggaagcgaggacaaaaacttgagaagatcaatatttatatcgtctgtatgcggtagaatttgaaaatttcccagtactcaaaagaaggaatgacacagaaaaatcgcagcactctttatttttacctcatttcaaaaaattattcaacttaaataatgctttgacatataaatgatagggatgactctttattgcaaaagaaaagcgggactttccgtcccgctttttctatttatggccggatcacaagatttggttttttcttcaggctgtgtcttccgtcaacgaatcggaccgttcctgatttcgcccggatgaccagactttcagtcgtgccgacggagcctttgaactgaacgcctttcagcagctctccgtccgtgacgcccgttgcggcaaaaatggcgtcatcccctctcacaaggtcctccatccggagcactttggatacatcaaggcccattcgctcacagcgggcctgctcttccgcactttgcggcagaagcctgccgatgatttcgccgccgagcgcttttaacgcaacggcagacagcacgccttcaggagccccgcctgaaccgaagagaatgtctactcccgtatggtcaaaggccgtattgatggcgcccgcgacatcaccgtcgttgatcagtttgattctggcgcccgcctcacgcaattcagagatgattttttcatgtctgtcacgatttaaaatggttgccacgacatcttcaatgtctttgtttttcgctttcgcaacggcttttaagttatcaatgacaggcgcttcaatatcgatgcagcctaccgcttcgggaccgaccgcgattttttccatatacatatccggggcgttcagcagtgttccgtggtcggcgaccgcgatcaccgtcagcgcattccagccgccgctcgctacgatgtttgtgccttcaagaggatcgacggcgacatcgacgcgcgggccgtatccgtttccgagcttttcgccgatgtaaagcatcggcgcttcatccatctcgccttccccgatcacgaccgtgcctttcatcggcaccgtgtcaaacacgtcacgcattgcgcttgtcgccgcatcatcagcttcatcttttttcccgcggcccatccatctggcagatgctaaagccgccgcttcagtgactcgaaccaattccatcgataagcttctttccatttcaacacgatctcctctcaaaagtccgcatttctatgaattttggagctgttctatctcttcgtccgtcagtctttgccgccagattgtggcgcccagaccttcgagttttttctcaagattgctgtagccgcggtctaaatgctcgagaccggtaatttcggttacgccgtcagccatgagcccggcgacgaccagacaagcgcctgcacgcagatcgctcgcctttacttttgcgccctgaagctcggccggaccggtgataatggccgacctgccttccactttcatgttggcccccatccgtctcagctcatctatatgtttaaaacgggccgagtagatggtatcggttacgacgctcgtgccgctggctctcgttaacagagatgtcatcggctgctgaagatcagtcgggaatcccgggtaaacaagcgtttttacgtcgaccggttttatctgcttctgcccgccgagcataagaagctgatcgtcactcgtctcaatgtgaaaacccatttccctgagcttcgccgttaaagactccaggtgagtcggtatgacattatcaataatgacttctttccccatcgcggcgccggcgatcataaaggtgcccgcctcaattctgtccggaatgatcgtatgcctgcatccgtgcagctcttttacgccgtcgattctgattacattggttcccgcgcctttgatctttgcgcccatgctggtgagcaatgtggcaacatcaataatctcaggttccttggcggcgttttctatcacggttttaccttcagccagtacagcggcaagcatgatattgatcgtcgctccgacgctgacgacatctaaataaatccgtgcgcctctcagcctctcggcgcgcagataaatcgcgccttgttcattggtgacttccgccccaagcgcttcaaaccctttgatgtgctggtcaatcggccgcggcccgagatggcatccgcccggcagtccgatgaccgcctgtttgaagcggcccagcatcgcgcccattaagtaataggaagcgcggagttttttcactttgccgttgggaagcggcatgctgatcatcggggaagggtcgacgaccatttctcctttttcaaaatggacgtttccgccgatttctttcagcaggtcacgcagcgtttcaatatctgagatctccggaagcccttcaatcgttacttcggaatttgccagaatggttgcgggtatcaatgcgacggcgctgtttttcgcaccgctgatatgtacggttccgtttaacggatcgccgccggcaatattcaacttttccatgatagtctccttccataagaagatagctgcggagcgtaaataaaatggcattttattctgtctctgcaaataaagctcttgtccaaaatgtagccaattcgaagagaaagaatacaaggacattataaaataacaggaagaaaatagcgaagctttgcggggcatttttaacacaggatgcacagaggcccgccgggttcacattccggggaaacacactcttcactttgatactgaaggcccgctgccaaacaggaaaacataagggtgcggcaaacggatcaaccggtttgccgcccttttcacccttatttattccagtctgccaagaattgctcgatgcctttatccgttaacggatgtttcgccagctggtgaatgactttcagcggcatcgtaccgatatgcgcaccgcgtaaagcggcttcagtcacgtgctgcgcatgacggatggaagctgcgatgatttgtgtatcaatgtcatgaatgtcaaaaatctgtcttatttctgaaatcagttcaagaccgttatggccgatgtcatccagacggcctaagaacggagatacataagtcgccccggctcttgccgccaaaagcgcttggttggcgctgaaaatgagcgttacgtttgttttaatgttcaggtcgctcagcgcttttacggcttttaacccttcagacgtcatcgggattttcaccgtgatattcggtgcgattttcgcaagttctttaccttcttcaatcatctcttcagcattcagggaaatgacttccgcgcttactgatccgctcacgacttccgtaatctcacgaagtctgtcatggaaagacacgtcagcttctttcgccactaaactagggtttgtcgtaactccggcaagaacgccaagttcataagcttctttaatctcgtcaatgtttgctgtatcaatgaaaaataacataaggaaagcctccccagtaataaattttcagaactgtaaaacatgattgcgctttctaaaggtaagacataaaaccgcctgtcaatcctgtcaggcggtttatggatgttacattggattaagcttggtttgaagaaccgaactcacgcattttgccgataaccgtttctttgatcgcttcacgagcaggtccaagatatttacgaggatcgtattcgttcggcttagctgccaatgtttcgcggacagcttttgcagaagaaatttggttttcagtgtttacgttgattttagccgtaccaagtgagattgattttttaatgtcggcagtcggaattcctgtaccgccgtgaagtactaacggaaggccggttgatttgccgatatcttccatttctttgaaaccgaggttcggttcgcctttgtaagggccgtgaacagaacccagtgcaggtgcaaggcagtcgatgccagtgcgctctacaagttcttgacactctttagggtcagcatagattacgccttcagcaatcacgtcatcttcctgtccgcctacagttccaagctcagcttcaactgaaacgccgtggaaatgagcaagctcaaccactttagctgtagttgctacgttttcctcaaacgggtggtgagatgcgtcgatcattacagaagtgaagcctgcatgaatcgctttcgcacaagattcaaagcttgaaccgtggtctaagtgaatggcgacaggaactgtcactttgtattcttccataagagctttaaccatggcaaccactgttttgaagccgcccatgtagcgtcccgcgccttctgaaacaccaagaataaccggggatttttcctcttctgctgcttgtaaaatagcttgagtgaactcaaggttatttaagttaaattgtccaacagcatatcctttttctttagctgtattcaacatttccgtcattgaaactaaaggcatgtcgaaagtcctccttatgtagcctgatttgcttcttctcgaaaaaagctttccacctatagcatgaccataaaaacctgtcatatgtaaaacaacagatcgctttttctccatctctaggataccaacttttcgacaaatcggcaacacaatgacataattgtttctaattttattaattcgattttagaggtaaatattttttcaccgcgtctctgatctcatcaatgtcaaaaggtttcgcaaaatgggtcagcgctccgagctcttttgattccttaatcatatcgagttctccgtaagcggtcatgataatgacgcggatagattcgtcgatcatcttcatgcgcttgagaatttcgattccgtccatgccggggattttcatatctaaaagcacgagatcgggccgttctttcgttacgatgtccagcgcctgtatgccgttggcggcctgaaacgtctggtacccttctttatgaaacacttcattgagcaatatgcgtataccgtattggtcatctacgattaaaatcttttcattcatcattttacaccccaatattatcattttcgtcaaaaggaagcagttgtttatgtattctgtttgattttcacatttcctttaattataatagtctactttccgacattttctgagcattttctcttttgttgtatactgttcttgtatgtgtaaaggaggtttcactcatgttaaagatatttacgacgcagcttgcaggcattttttcccgcattcaggataaggaatccgaagcaatagaagacggcgcgcgcctgctggcgcaggcagccgtcagcggccataccatttatttatacggcgcaaatgagatgcagggcattctgtgcgaagcggaactcggctcagaaccgatgccttccgtcaaagcgtttccggatacagctgattcgattacagaaagcgacagggtgctgatgttttgttcaggtccgggcacggctgaagaacaggcgctggctcaaaagctttatgaaaaagggatcggcctcgttggcgtatctcctgtcatcaaagatcaaaccgggattgaggaattttgtgatgttcatattgacagcaaattaaaaatgccgcttctgcctgatgaagacgggacaagatacggctttccttcattaatgacaggcctgtatgtctatcacgcactgtcctttacgttaaaggaaatgatgcaggaatatgcctgatgcagaaaaaagacttgccgcttttaaaggaggcaagtctttttttattacttctgttctgcagcttgtacggaagcgccgataaagtctttgaataaaggctgaggtcttgtcggtcttgatttgaactcagggtggaactggcaagcgacataccaaggatggtctttcagctcgatgatttccacaagacggccgtcagggcttgttcctgagaacacaaaaccgttctcttccatttgctgtctgtattcgttgttgaattcataacggtggcggtggcgttcgtataccacttcatccgcatacgcttcgaaggctttcgtgtcttcctgaagcttacaagggtacagtccgagacgaagcgttcctccaagatcctcgacatctttttgttccggcagaaggtcgatgatcggataaggagtggacggatcaatctccgcagagtgagccccttccagacctaatacgtttcgtgcatattcaatggatgcaatctgcataccgaggcagatgccgaagaacggaattttattctcacgcgcatacttggcggcgatgattttcccttctacgccgcggtctccgaaaccgccgggcacgatgattccgtctgtgccgctagtcagctcttgaatattgctttctgtcacttcttcggcgttaatccatctgatcttcacatcagcgtcaaacgcatagccggcgtggcgcagtgattcaacgactgaaatgtaagcgtcctgaagctcgacgtattttccgacgaggctgattgtaatggttttagacaagtttttcactttcgtgacaaggtctttccattccgtcatatccggatctttgcattctaatttcatatgatcgcagacaagcttatcgagtccctgctcctgaaggttaagcgggatggagtaaaggttgtccgcatcttcgcactcgatgaccgctttcgtgtcaatatcgcagaagagcgcgattttatctttcatatcttgagaaatcggcatttccgtgcgcacgacgatgatattaggctgaataccgaggcttctcagctcttttacgctgtgctgcgtcggttttgttttcagctcgcccgccgctttgatgtacggaacaagcgtacagtgaatgtacatcacgttttcatggccgatgtcgcttttcatttgacggatggcttcaaggaacggaagggattcgatgtctcccactgttccgccgatctcagtaatgactacatctgcgtttgtttctttgcctgcacggtacacgcggtctttcagttcatttgtgatgtgcggaatgacctgaaccgttccgccgaggtagtccccgcggcgctcttttttcaatacggcagaatagattttaccggtcgtcacgttgctgaatctgttcagattaatgtcaatgaaccgctcataatgccctaagtcaaggtcagtctcagcgccgtcatcggtaacgaatacctcaccgtgctggtacgggctcatcgttcccgggtcaacgttgatataagggtcaaatttttggatggtgacgctcatgcctctgtttttcaaaaggcggccaagtgatgcagccacaattccttttccgagtgatgatacaactcccccggttacaaaaatatatttcgtcatttcgtttgctcctctcttcggtctgcgctacattccttaaaatgtgccgttttatagaaaatcatttcactaaaaacaaatgatgtgtaaaagaatttgggagatgaaaataagaaagctccctttcaatttcttgaaagggagcgtagcactcttatgaattctcttctttttgaagagcccaaaatacatactacatagttcgacaatgaaagtcaagatcgttttgctgatataaaatcagtctttgcgatcctcttcctcatcatcataatcttcctcatcttcttcaatcatctcgtcttcgatctcaagctcgtcgtcatcttcttcatcgatatcttcgtcgtcaaagctgtctgcttcaaggtcaatatcttcttctatttcatcgagatcgatgtcatcttcgtcaacttcctcgaattcatcaaggtcgagatcttcctcaacgacttttttcgcttttttctttttcgcttttacagtcggctgtgtttcttcgtccagctgatcgtacggataccagctgcgaagcccccacgtctggtctgacagagcaataaagcggccgtcaatgttcaggtctgtataaaattgggcgatacggtcacccagttcctctttcgtaacaccgagcaaggagatcatttcattcagcagctcctggaacggaaccggttttttatgttctgagaaaatttcgtgagcgatttcaactaaagccatctgcttcagctgttcctgagaatattgtttgatactcaaggtcggacactccctttctattacttatatgtatctgtttctatcctataataagaacgaatttgtattgttttgttcataaaccatacctctcattataaacaaattaaaacagaatatgctacccttaacagcgtaatttaagaaattttagagccgtcccttcataaatcggctgatgtgcgaaaacaaagccgccggcatatgcgccggcggcccgcttctttctataaagactcttgtttttcggcgccgaatacagacatggcgagcaattcactgacatcataagtgccgatcgcgtcttcggcttctttcgctttcgtaccgtcaccgagcatggtcagacagtaaggacagccggagctgatgaccgtcggactgacagaaagcgcctgctcagtccgggccgtgttgattctcgctcccgtttcttcttccatccacatgagccctcctccggcgccgcagcacatcccgttttcgcggctgcgctccatttccttcaattgaacgcccggaatggcttttaagatcgctctcggcggctcatacacttcattgtatcttcctaaatagcacgagtcatggaaggtaatcgtttcattcaccgggtgaagcggttttagtttcccctgtgacacaagctcggctaataattcagtatgatgatagacttcggcccggaatccgaaatcaggatattcatttttgaacatattataggcgtgcggatcaatcgtgacgatttttttgatcccgtgtttttcaaattcgccgatgttgtgttccgccagctcttggaacagaaactcgttgcccaaacggcgcggtgtatcgcctgagtttttttccttattgccgagaatcgcaaaggatacgcccgcttcattaagcagctttgcaaatgagacggcaatcttttggctcctgttatcgtaggaacccattgatccgacccaaaacaaatagtcgaactctttgtcttgttttttcatttctttcactgtcggaatttctgtatcagcctgctcccgccagttctcccgctctttccggtttaagccccacgggtttccctgtctttcaatgctagtcatggcccgctgcgcgtcgctgtccatcttcccttccgtaagcacaagataacgtcgcagatcgataattttatcaacgtgttcattcatgaccggacattgatcttcacagttgcggcaagtggtgcacgcccaaatctcctcttccgtgatgacctcgccgattaagctcgggttgtaatcgatggctgccgccgcttcacgcgatcctccccctgaggaagccgcggcgagctgattcgccttcgtgtgctgaaaaacgggcgcgggcacccacggagattttgacgtcacggcagcgcctttttccgtcaaatggtctctgagctttaaaatgaggtccatcggcgagagcatcttgcccgtaccggaggccggacacatatttgtacagcggccgcattcgacgcaggcgtaaaggtcgacaagctgagagcggcggaagtcttcaatctttccgacgccgtagctttctttcgactcatcggtgaaatcgattttttccagctttccttttgaatccagcctgctgaggaacacattcgccggacccgcaattaagtgcgcatgctttgattgcggcacgtacactaaaaagctgagcaaaaacaacagatgaagccaccatgaaacataaaacacggcggcggccgccggcgctgaaagaccgccgagcacaaacgcaatggaggaagcgatcggttccgtccaagacagagaatgatcgtgccataaaaggttcatggcgttcccgagaagcaccgtcaccatcagtccgccgataaacagcaggacaagccccgctttaaacccgcgtttcagtctgacgagtttttcaatgtagcgccggtaaaacgcccagactacggcgactaaaatcagaaacgtgacgatttcctgaaaaaaggtaaacgccggataaagcggaccgaacggcagatggcggtcaggaagcagccctttcagaataaaatcaattgcgccgaactgaacgagtataaaaccgtaaaaaaacagaacgtggatgatgccgctctttttatctttcagcagttttttctgtccgaacacattcacccatatcttctgaagacgttctttcaggcgtttatcaaattcttccctttggccgagcttaatataagcgatcctcgttctgatcaggtaaacgaataaataaacggcgtaagcggttacagctgaaaacagcagcgcgtttaccatgagaaatgcgttcatcttgtctccccctttgttctgatacccctcttcattgtcatatctttactttatcataaataatgaatgagtgttcagtcaataattaaattcacattctcagggcacactacgaatacttcggaaaggagcgtcggtatgaaggtcatttttgtgttgcttgtcatttttatcatattgatcgcacttatgctgcttgatatgctgcttggccgggcggcgtacaaaaaacaggcgtatgagcccgtttttgacccgaaaaagagtgatatcacactcattcactgcggcagcgagcttgtgcggcagatgacggctgatatccgccaagccgtctcttctattcatatgatgttttttattatgaagaacgaccaagtcagccatgagatgtttcatttattgaaggaaaaggcccaggccggcgtctccgtatatctgctgctcgattgggcgggcagccgccaagtgaaaaagccttccattcaaacgttgaaaaaagccggcgttcacgttcattttctaaataaaccggcatttccgtttctatttttcaggctgcaaaaacggaatcaccggaaagtgactgtcattgacggcaaaatcggctatgtcggcggttttaatatcgctgaagagtacctcggcaaaaaagcgaagttcggaaactgggaggattatcacctgcggatgaccggagaaggcacggcggatcttcagactctttttgtaagcgatctgaaacgaaacaccggaaaagcacccggatcacccggggtttatccggcattatccgaagggaatatctctcataggacatatgcgtctgacggtttttcgcttgaatcgcattatgaaaactgcatccgtaaggcggagaaaaaaatcattatcggcacgccttattatgtaccgagcaaaaagcttcaggaagcgcttatttcagcctgccgaaaaggcgtcaaagtcatcttgatcgtgccgatgaagtcagaccacccgttcgttcgggaaacagcttttacctattatcccgagcttctgaaggccggctgcctcatctatcggtattatcaaggcttttatcatgtcaaagctttcattattgatgaccgcatcagcattatcggcacgccgaattttgataaacggagcctgttctggaatgaagaggtgaatgtcatcatttatgatgaagcctttacaaaggaagtgctttcaaccataaagcaggacatcgaaaaatccgagcttctcacattagaaaaagtgaaacagcgctccgtcagacagcttcctgcagaatggctgggaaaggccatatcttactttttataaaggagaaaccatatgctgttcagattcggattcgtcgcaaacgccatgtgcctttgggacgcgtcccccgcaaaaaccttaacatatgcgcgctataccaaactttcccgcagcgagcggaaagacgccctgctttctgtgacgaaagcaaatctcaccaatacgctgcgcaccatccactatgtgatcagccacggcatcccgctgtacaggttctcaagctcgattgtgccgctcgccacccatccggatgtgctgtgggattttgtcacgccgtttcgccaggagtttcgtgagatcggcgggctggtcagaaaatatgacctcagaacgagctttcatccgaaccaattcacgctttttacaagcccgaaacaggagattaccgcaaatgcggtcaaggatatggcctatcattatgacatgctggacgcaatggacatcgcggaccgttccgtcatcaacatccatgtcggaggcgcttacggtgacaaacaaagcgcgcttggccgtttccgcgtgaatctgaaagaacttcccgatgtcatcaaacagcggatgactttagaaaacgatgataaaacatatacgtccgaggaaacactcagtgtatgtgaacaagaaggtattccgtttgtgtttgattatcaccatttttacgccaatccgaccgatgacgctgatttagatgacattcttccgcggatgatcaaaacatggcagcggatcggcttaaagccgaaggtccatctctcctcgccaaaatcagaatcagccatacgcagtcatgcggactatgtggatgcgaattttattctgccggtgctggagcggtttcgacaatgggatacggacatcgattttatgattgaggcgaaagagaaagaccgggcgctgctccggctcgtcgaagaattaagcgccatccggggagtcaaacgcctggcgggcggagtgctgaggtggaaggcataaccaggtttatcacccgtttatatggggaatttccgaaataacagaccatcagacggaggagaaaacatatgaaaaacattacatctttgaaaatagccgctaagaagttcactttaagaaacatgcttcagctttatcagctttgccacacgggaggccacgagctgtatatctactctaaaaaaacgatgtgcaaaatcaaagatatcattgaactggaaacgttcagaatggcccataaagaacaagaatatttaattgtagtggaaggaaagaaagcggtgcagcttgttgaccgtttcaaacatatcatcgaacctgcgcaaaaagaagcccattaaatacggactacataaaaaaaaggatagacaggaggctgcccggccccttttgtctatcctttttcttttattgatgtatcagctcgccgaattgggcctgatggagtctctggtacatgccgccggatgccagcagttccttatgatgaccttgttcagcgatgccttctttcgtgacgacgacgatcctgtccgcatccttaatcgtagccagccgatgggcgatcacaagcgtcgtgcgtccttcagacagctcttgcagcgatttttgaatggcggcttccgtttctgtatcgagggctgatgtagcctcgtctaaaattaagatcgacgggtttttcaaaaacattctggcgatggaaagccgctgcttctgcccgcctgacagcttcacgccgcgctcgccgatcaccgtgtttaaaccgtcgggatacccgtttaccaagtcctctaaatgcgcctggcggacggcctgccagatttcttcctcagacgcgtcgagccgcccgtaagcaatgttttcccgcaatgtgccggaaaacagaaagacatcctgctggacgacgccgatttgtccgcgcaatgatgacagcgtcatgtccttaatatcgattccgtcgatggaaatcacgccttcagacggctcataaaagcgcggcagcagacttgtcagcgttgattttcccgctcccgaaggcccgacgaatgcgactgtctccccggcatgaatggacaaattgattcccgacagaacaggactgttttcttcgtaaccgaacgacacaccatcataacggatattcccttttaaaccggacacatgtctcgcgttcggggcgtccttgatatcaggctccgtttccagtatttctataaagcttttaaaaccggcaatgcctctcggatacatctcaataatcgcgttgattttatcaatcggacggaacagaacgttcgtcagcagcacaaaagcgacgaattccccgtaagataacgatccgcggatcacgaaccatgtgccgcacaataagacgaacagcgtgacgaatcttgtcagcatgtaactgatcgagccgtttttcgccatgattttatatgacgtcagctttgttttgcggaaacgctgattgttcacgtcaaaccgctgcgtttcaaacgcttcattgctgaaagcctgaacaagacggatgccgccgatattgttttcaaccctcgcgctgaagtccccgacgtctttgttcagttttgtaaacgcagaggtcatttttttattgaaatacaaagcaagccatatgacgaccggcataatgataaaggtcaacagcgcgagctgccagttaatgaacagcatcacaccgaacgcgcccaaaatcgtcatgatcgcgataaacaggtcttcaggcccatggtgggcggtttctccgatatacatcaaatcattggtgagcttggacattaaactgcccgttttgttgttatcgtaaaatttgaacgaaagcttttgcagatggtcgaaaagctttttccgcatatccgtttcaatgttaatgccgagcatatggccccaatacgtcacaacatactgaagtgccgagctgagggcgtagaccccgaataaagcagcggaagtcaaaataatcagactccaatcccgccccggaagcaatgtatcgataaagtaattgacaatcagaggaaaactcagctccatcaatccgccggcgatggcagaaaagaagtcgagaaaaaacagctttttgtacggtttataataagaaaaaaattgtcgcagcacgattccgtcctccttgtgcctcgttcttaatgataatatttctcaattatactatacacaaggagttttaaaagcgttttttataaaacgccggaaaataaccgtgcgaaggattccttcgttctttcccataatgtgcgcttatagaaacggacggggctgattttttcagactccttcatatcctccagataatgcgcttcaagatctttgatcgcctcttgatctgtaaaaaagacattgacttcaaagttcagctgaaagcttctcatgtccatattcgccgtcccgacagaggcgaggtttccgtcagtgatgagcaccttttgatgcataaagcctttttgataagaatagacttcgattccttcgcgaagaagctcggggaaatacgatctcgtcgcgtactgggttaaaaatccgtcattggtttccggcaccatgacacgcacccggacgcctctggcagcagcctcctttagcgctgtgcggatcggctcattcggcacgaaataaggcgtcgcgatccatacagacgattcggccgccgctatcatggcataatacagatcgctcatccgctccttcatatcggggcctgtcggaacgacttgatagacgccgccgctttctgccgcaaccgggcgggtatatgctttccgatcaatcagcacctcatccgaaacgtattcccaatcaagcataaaaatgctgtggagcgtctgaacgatttctccttcgactttcatatgggtgtcccgccaaaagccgacatcttggtctttgccgatatactccttgccgacattcagcccgccgacaaaaccgactttcccgtcaacgatgacgatcttgcggtgatttctgaaattgaatttttggttgaaaaaaccgtatttcagcggcagaaaagggacgatgttcacgcccgcgcgtttcagttttttaatatcttttccggccagcttcaggctgccggccgcgtcgaacaaaaaccgcacttccacaccttgacgcgccttttccatcataatgtccatcatcttgtgcccgagcatgtctgatttgaacatgtaatactcaatatgtataaatgacgcggcctcccggagcgcctcaaacagctccggaaatgtttcgtccccgtttttgagcaccttcagcctgctttttgtattgatattcatatgggacgctttgattgaatattgaaagaaacgcttctgatttcctttcagcccggtcaggtcgggagtttgttccatatcaaatatcgttctcagcttttcccggttgtatgtccgtttcgacctgaacagcttgcctttttcataaagctggccggaaaaaaggtaaaataagtacccggcgatcggaaaaaacacaagaatatgaatccataacagcgtgtgctgcgaggtgcggttttcaagaattaacgaataaatgctgaacaaaataatgcttgcataacaaagcacccctccgtaaaactcaagcctggaaaccggaaaaaaccatatgacatatgctccgataagcatcatatataaaaagcaaaattccagtctccttttcagcatcccgactctctcccatctgatccgatatctctgtataccctctgttttccggcttgtaaacatatgaaaaagcctctccgcacgagcggaaaggcttatgatgaagcttcctgtgattggccgggtgtgatgttctgaagcaatgccggattgagcgagcagctgcctttgattttatttttgaagatgccgatgatcagaccggtgaccgctatcgacactaaggagaagagccctttcagcagcccgacggaaaaaatgccggccagcacgacgccaaaatcgaagaggaaattaacggcacccggattccatccgcagcgcttttgcagaaataaagcgaggatattggcgccgccgagcgatgcctgatgataaaacatgagcgacaggccgaacccgatcagcgccccgccgcaaatcgccccggcaagcggtgaaacagagaccggcggcagccagtgatccgcgccggtaaacagagtcagtactgtgactgcaaaaacggtggatagagtgaatttgattcccattctgatgagagaaaatatataaaacgggatattgatcagaaagaagataatcgcaaaagaggaatgaaacaagtatgacaggcttagtgacagtcccgctgtgccgccggttaatacatgagaatgtctgagtgtcaggacgccggcgcttgtcatcagacaggcggctaaaatgaggaaaatccgcttcattcttcactctccttttgttgctgttatttccaaataaaacataacaggaatcccggctgcccagccattaccttggcagaaaatatcttatgtttttattttttcaccataaaaaatccccctcttgcaggggggatttttacgtgcgtttccgatagacaacatagctgcgggtcaaatacttgaggggcaggctgaacacgtgaaccaatcttgtaaacggccaaaggataaaaacgacgtaccctatgatgatatgaaacttaaaccatagcgggacactctccatcaaagaagcgtcaggccggaacaaaacaatttccctgaaccacggcccgactgttgccctgtaatcaaatcctttcgagtcaatgttgagaaatgtggccgcaacgcccgacagcatcatgaacagcagcagaataagcgtcaggatatccgatggcgagctggttttgcggattcttttgtcaaacagccttctgtatgtcaggatgacaagtccggcacatgccgcgatccccgccggcaggcctgcgccgatcgccattttgtgatacatatgctcggaaatgccaagagaagcatacacgccttccgggatcaaaattcccatgatatgtccgccgacaacgcatagcagtccccagtgaaaaagtgtgctgccagcggcgagttttttcttttctaacagctcgcttgatttcgccgtccagccgaattggtcatgctgatagcggtaaatatgcccgccgataaagatcgtcaatacaatgtatggcataacgccccacaggatctgcccgctcatgcctgaacagccccttcttcagtgcttgcatgtacaccgatgttttccagtgcggcctgcagcacgtgcagcagctcagcatagatgctgttatttttttcgaggcgggaagccagctccctcacgttggacaggtatttttcaaacacgcttctcgccgcttcaatctccgcaaccgcggcgaattccagcatcagcggcaggtaatcaggcagttctttctctgtcgacaggaaaccggattgctggtaggtgttttttaaatgcagcaattcaatgccgcgctccctttgttcgcctgagttaaagtaggtgacgtacatattcgttttctttccgaaatcgaacgtatacacatagtgttcaatcagcgcttgcggagaaaagcctgctgccgcctctaaaaagtgcagcaatttctcccggatttgctgattggtgatgtcatggataagagccttccaatcgggaatctcggctctccactcttcatccggataagagagaagaacggaaagagcggagaacgtcatttgccggtctgtggtgttcatgttattacacctcatttatgaaaaattagaaacaagagcccgggccgcctgaaaatgataagccgcagctcccttgttcagcatataaatctgacacttcttctcgatggctgctcgggatcacaaaacggtcatcatatttggcgattgccagcagccgatacatgtctttaatttgctgttctgttaagccgacactggagatcagttccgggtcgattgatttattcgtctggatcgctctcatatactggcgcatgacagacattttctttaacgttgatcgaatatgatccgtatcccccgccgttaacagctgcgccaaatagtcaatcggaattctcatttggtcgatagccggaaaaatagcttccgccgtttgccggcttccttttccttcaaagagattcataatcgggctgagcggcggaatgtaccaaaccatcggcagcgtacggtactcaggatgaagcggcagcgcaatcttccagtcgatgatcattttatagattggtgattgctgtgcggcctctatccattcagccggaatgccttgttcttttgccagtttggcaacctcaggatcattcggatcaagaaaaacgtccagttgggaatggtagagatccttttcattttcaacagaggccgcttcctccactttgtcggcgtcatacagcatgacgccgagatagcggattctgcccacacacgtttcagagcagatagtcggcagccccgcctccaaacgcggaaagcagagtgtgcatttttccgctttgttcgtttgccagttaaaatagacttttttataaggacaggatgagacgcaatatctccatgaacggcatgcattttgatccacaagcacaatgccgtcctcctcacgtttgtacatggcgccggacggacaggatgagacgcacgccggattgatgcagtgttcgcaaatacgcggcagatacatcataaagacttcatcaaattctgttttgatcgattcctccatcttttgcacgtttggatcttcaagacccgtaatatggccgcccgcgagatcatcctcccagttcgggccccattcgatattcataaaatcccccgtcaaggacgatttcggccgtgccaccggctggtgttttttctgcgggctgtttgttaatgtttcataatcatagttccaaggttcatagtagtcatcaatcgtcggctggttcgggttatagaaaaggcctgcaagccgattcgttttcgggcctgatttcagttcaagctttccttttttcaacgtccagccgcctttatatttgtcctggtcctcccattgcttcgggtagccgatgcccggctttgtttctacattattgaagtacatatattccgcaccggaacggtttgtccacgtgtttttgcaggtgacgctgcacgtgtggcagccgatgcatttatccaagttcatgaccatcccgatttgcgctttaatcttcaagccaatcaacctccttcagcttgcggatgacgacattcagatcgcgctgattccccgtcggaccgtaatagttaaagccataactgagctgtgcatagcccccgatcatctgggtcggcttgacgtgaatccttgtcgggctgttatgggtgcctccgcggttattcgtcagttttgtgccgggcacattgatgtggcggtcctgggcatggtgcataaacgccattccttttggaatccggtgagacaaaaccgctctcgcgacgacaacgccgtttcggttgaagcattcaatccaatcgttgtctttgatatccgtatccgcagcatcatctttattcatccacacagtcggcccgccgcggaacagcgtcagcatcggcagagaatcaaaatacatgctgtggacggaccatttattatgcggcgtcaaataattaagaacgatttctttgccctcttgatcaggccgcttgcttaggaacggacggtgctggaggatcggtttaaatgtcgccatcgtttcaccgaattccatcatcagttcatgatcgacataataggattgtctgcctgtcagcgtccgccacggaattaatttttccacattcgtcgtaaacggcgagtacctgcgccctcctttttctgaaccggtaaaggccggagaggtgatgaccgttttcggctgggctgtaatttgctcgaacgtaaagcattcttcctcgcgctcttccgccaggtctttcagctccagattggtaatgttttcaagtgattcccatgctttcacggcgacttttccatttgaggtggacgacagggttaaaatcgcttccgccgcctgcttcgcttcacttatattcgggcatcctttggcaacgctgtttgaatcggtttctcccagtctctgtttgagtgattcatattcatccgcaatcgaccagctcatcccttttgttccgctcggttttaaagccgtatgagggccgagcgcggtcattttatgaaaaatgtgtttgtaatcccgttcaacgacatggatgttcggcatcgtttttcccggaatggcttcacattcgcctttgctccagtcattgattttgccgaatggctgggccaattcctgcatcgtgtcgtggagaagcggcgttgcgactacctcttttaccggctccatatcgacttcttccgccagatcggaaacggcttttgacagcgccttaaaaatatcccagtctgacttcgattcccacggcgccgagatggccggagcaaatggatgaataaacggatgcatatccgtactgctgagatcgtgtttttcataccatgtagccgccggcagcacgatatcggaatacagcgccgtacccgccattcgaaaatcaagattgattaacaagtcgagcttgccttccggcgcctgctcccgccatttgatttcttcagggcggatgctgtcgctgtcgtcattcatcagaccgttcgtcgtccccagcagatgcttgagaaaatattcatgccctttccctgagcttgagatcagatttgcccgccatacgaagagattccttgggaaattcacttcattgtcagggtcttcaatcgccaatttcagttttttctcttgaagccgtgaggccacgtacgcacctacgtcttcaggtgtcgccgcccccgctttctcagcttctttgtacagatcaatgccgttttgattgaatgtcgggtaagacggaagccaccctaatcgcgccgccagcacattgtaatcggcgtgatgcctgtagcgggatgacgcggtgatcggtgaagccaagtcactgatcggctggtcttcataacgccactggtctgtcgcaaagtagaaaaacgaggtgccgttttgaagtttaggcacgccttcccagtcctttgcggttgcaatcgtctgccacccttcagccggacggagcttttcctgccccacgtaatgggcccagcctcctccgtttacgccttgggcgcctacgagtaaaacaagatttaacaccgcacggtaaattgtgtcggagttgaaccagtggttgatccccgcccctacgataatcatggatctgccgtctgtatcaatcgcattttgggcaaactccctggcaatctgtataacggcttctcttttaattcccgtgatccgttcctgccaggcaggtgtgaacggacggggatcatcataggatgcggctgattgtccgccgatgccccggttcacgccgtagttggccaatatcaagtcaaacacggtcgtgacgtacgtctcttcaccattcagatccaattttttaataggaagattccgctcaagcactttgtttccgtcatttgaaaaatacggaatgcgcaccatgccgatttcgtcctctattccgagcacggagagacggggttcaatcggttccccggtgtcttcgtcgatcatgtgcagattccatttctgctgcccgtcccagcgagagcccattgtgccttgcggtatggcaaacgcacctgtctgttcattccagaccgccggcttccactgatcattttttgtctgccgcccgatgtcttttgcatgcagaaaccgtcccgctgtgtatacgccgttctcttttgaaagagtgacgaagaatggaaaatcggtgtattgcttcgcgtactcaataaaacgttcagtttcttggttcacgtaaaattcctgcaaaatgacgtgccccatcgccatcgcaagcgccccgtcagtcccctgccggatgctcagccagtcatccgcgaatttagaggattccgcaaaatcgggactgatcgaaatgaccttggcgcctttatagcgggcttccgccagaaaatgcgcatcaggcgttctcgttaacggaacgttggagccccatgtgatgatatagcctgaattgtaccaatcactgctctccggaacgtccgtctggtcgccccaaatttgcggggacgccggcggaagatccgcataccagtcataaaaactgagcattgggccgccgattaaagacatgaatcgcgagcctgatgcgtggctgatcatggacatcgccgggatcggagaaaaaccgacattccggtcaggcccgtatttcatcactgtatacagcagagaggccgaaatcagcttcagcacctccggccattccgcgcggacaaagccgcctttcccccttgcctgtttataggacttcgctttttcagggttttcgacgatcgatttccaggcatccagcggattatgatgcgcctgcaatgcttcccgccacaaattgatcagcacaccgcgcacatatggatatttcacacggagcgggctgtagatgtaccaagaaaaactggccccccgcggacagcctctcggttcgaaatcaggcatatccgggcctgttgatggataattcaagttttgtccttcccacgtgacaattccgtttttcacataaatattccagctgcaagaacccgtgcagttgacgccgtgggtggagcgaacgactttgtcgtactgccatctgtttctgtatacattctcccaatcacgatcttcgcttgtcgtttggctatggttatttgaatgatgttcgataggagaaaaatagtttaatctcctgagcaacggactcattttctttttcttcatgatcgttcactccttccgagtcaggtgatgctatgtacactataaacagagacggcgcgttttcttgtgaactatgtcacacactctgcttttttcacaaaacgttcacactgagcagcaggaaggattttcaaacgatatggggacgcccggcgtcatcaaaaaaccggttctgtttaagaaccgggttcggcgttttcatcccgtgatgtatgcaggtaccgcaaaaacaactgataggaacagaagacattttgctgaagcatcgccaaaaagttcatttgcagccgcggatggtaagacatcatttgcttaaatacggaatatggaatatgaagtaccagaatatccggtgaggcattgactgagataaaaggcgataaatagagcccgcctttttcatcaatcggaaacacatcgcctttttcccacagcgcaacggtttgcgacccttcagggagcctgctgtccgtaaaacggatattgccttttaatacaatataaacggattgtgaatgaagaaaggatggagattggtcagatgagccgcggataaacgtcccgtttttcagcaaggtttcgacaatggacagaggcacttcattaaacataggaagttgtttcagaaataataaatagtcacactgattcataggaaagcctcctgtgctaaggatagctttagtgtagcccgattgagcctgcacggcagtgatgtatttcacagcttgtatgataaaagtcacttatcaggagagtgtatgtacttataatgaaataaaaaggagggtttcgatgaaggcgatgattccgaagcagcacggcgcatgggcgatgctgctgattccatttttactcggcatgatcaagggaggcccggttttctggcatattccgctctttctgggctggctgttcctttacttgacggtttatcccgtttcgctcgctttgaaaaaaaaacagcttcagccctatcaaaagtggatatggtattacggttttccggcctgctgctttttgatcatttctgtctatcataggccgcagctcgtctggatcggcgtttttttattgccgctgtttctcatacatacacattatgcccgccgaaaaaacgaacgggcgctcacgaatgatattgcgggtgttctgttcttttgttcaggcgggcttgcgagctgctggctgggaacgggaacccttgacagctgggcttggtttctattcttgcaatccgctttattttttgtcgggagttctttttatgtgaaatcggtcatacgggagagaaaaaacagaaggtttgcatactggtcgtggggatatcacctcttgctcccctttttatcggctcttctcggggcaggatgggcgtttctcgcttttatcccaagcagtctgcgggcctggttttttcacggaagagactggccggtgaaaacgatcggcattctggaaatcgtaaatgccggcttctttttcgccgtcatgtgtatatgtatcacaagctgaaaaacaaggacaccggctgcccttgtttttttcagtcaatattgcagatctccagcggacaattttcacactcgatctcgaatcgtaaatagtcccgcttgtgcaaaataatttttccggtttcgtctatcgaaataaccccttgtttgcggaggtctcccagcatgcggttgacactctcccttgccgccgcgcaaaacttagccaaatcctgatttgtcagcacaatgttaatcagaatcccgtcgtttcgcactaccccgtagctgtttgataagcggataagagtagaatagagcgccccctttttgccgtgaagaagcaggtccctgatcttggactggatttttcgaagatgggtgctcatccatttcataaattcaaacgtcaaaacaccgttttggatcaattccttttccagcttgtttttattaatgacgagcacctcgccatcctctaacactttcgcactgagcatatatctcggctcatctgtgaatagcgtcaattccccgacaatatcgtttttttggcagattctaagcgtcaggtcttttccgtcagacgtcagtttgccgatttcaatgagtcctgactgaatcagataaagctcttttgcatccattccttcttgaaacaaataagtatgttttttcattttccttttcgtactgatcgattccagcaattcatgcagttcgcgggaaagaagttctttatcagattttcggacagagagaatattcatgagctcacctcgaagaaagtcacgttgcgtatgtatattgtaacgtgacttgatttgcactcacccagaaaaaactaacaatcttgtgaatggatcattatgaattgaggctctgactgtttctctccgtatgtgttttcattctttcctgccaatacatccagatcacaagaacaaagctggctaacgcgacctctgaaagcgccataaacccgatcgcgtattggcctgttgcctgaaatacacttgccagaatcagcggagggaaaaaaccgcccagtccgcccatggcagacacaatcccgttggcaatccccgcttgcttcgaaaaatagaaaggcaccagtttaaataccgtcccgtttccaatccctgagcagactgccaccgtcagcgatccgaacgcataaaggccgatcgtcggggagaatgacagcatgacccctgacagcgtaagccctgcgaaaacgaacatcagaatgcggagcgggctcagtttatctgcaagaaaccctcccacaggcctgagcagcgtagagaccgcaataaagccggccgtccgcagaccggcgtccgcagggctcagcccaaaatgctcaaccaaaaaattcggaagatagatggtaaaggcgacaaaggcgccgaacgtaataaaataaaacaggctcaacatccacagcacatgatttcggtaaacggctttcatttgtgtctttatggaaattttgactttcttctcatgccggtcgccaagcaaaacgtgcagtaatgcgaaaacagccagcaaaacaagatacaactgcacggttgctttccatcccgcggcttgagcgataaccggcgccgcaaaggtagtaacggcggtcccgatgtttccggcaccgtaaatcccattgacgacaccgtgcttttctttcggataatatttcgggagggacgtcactccgatggagaataccgctcccccgatccctaagaaaaagccgcccgcgattaaatcaaataaagaatccgcgatactgatccaaaatacaggaaacaaaagcaggatgaagctgatcataaacatcagccgcgcgccatacctgttcgttaaatatcctaaaggaatacggagaagcgatccgagaataacgggaatcgccgtcaccaatgaaatttcgcctttgcttaaatgaatatctgatgtcatttgagaaatgagcgatgaaatcagcacccacaccataaaccctgccactaagcttaatgactgcaacgataattgaatatgttgacgattgatcattcggcttgcccctttcactgattcaatatcagtcttatcatacaaaaactcagtgtgcgggattgtgaattacatcacacgctttatatacaaaaaaagaacaaagcccgaagactttgtcctttgatcatcattacattttttccggagcggatacgccgatcagctgaagcgcattgttcagcgtaatttgcgtcgccttcattaaagcgagacgcgcgcggctcttctctttattttccggatcgatgactttctccgcattgtagaagctgtgcagagcggaagccagatcataaatatagtttgtgacacggtgaggaatgcgtttttccgccgcttctgccactgcctcagggaagccgccgatcgttttcagcaggtcatattctttttctgattgaatatggctgaaatcaagatctgccgccggtttaagtccctgctcctccccttggcgaagcatgctgcaaatacgtgcatgtgcgtattgtgcataatacacagggttttcgttagatgtggatacagcaagatccaagtcaaaatccatgtgcgtatcagcgctgcgcatcgcgaagaaataacgcacggcatccaagccgacttcttcaatcaagtcgcgcatcgttacggctttccccgtacgtttgctcatcttcattttttcgccgtttttgtataaatgaacgagctgaatgatctcaacttccaatgtgcctttcttgtaaccgagcgcttcaattgccgctttcatacgcggaatatacccgtggtgatccgcgccccatacattgatgagtttgtcgaatccgcggtcaagtttgtctttatggtatgcgatatccggcagcaaataagtgtatgagccgtcttttttgatcagcacacggtctttatcgtcgccgaacgttgtggagcggaaccatgtcgcgccgtcctcttcgtatacatggcccttttcgcgaagcgcctcaagcgcctgatcaatttttccgttttcgtacagtgacgtttcagaataccatacgtcaaacggcacgcggaaattttccaggtcggagcgaagtttatcaagctcgtactttaagccgtattcacggaaaaacgcctgacgttcgctctcctcttcgtgtacgaaacggtcgccgaaatcttcggcaagctttttcccgatggcgataatatcctcgccgcggtagccgtcttccggcatcggtttctcgagaccgagcgcttcaaaataacggacttcaacggaaagcgccaggttgttaatctggttgcccgcatcattaatatagtattcgcggctcacatcatagcccgctttagaaagcacgctgcacagcgcgtcacctaccgccgcgccgcgcgcatggcctaagtgaagatctcccgtcgggttggctgatacgaattcgacctgaatcttttcgccttgtccgatgtttgtctctccgtaatgttcacccgcttcaagcacggacggaatcagttttgttaagtagctgttgttcatgtaaaagttgataaagccaggtcccgcaatatccatcttttcaatggaagctttgcctttatcaaatgatgccacgatctcctcagcgatttggcgcggcgctttttttgcgattctcgccagctgcatcgccatgtttgtggaataatcaccgtgtgttttttctttcggcgtttctaacagtacgcttggaatctggctttcgtccgccaggcccgctttcagaacggccgctttgatttcttccttcagcacgtccttcatttgttccgcaatgttcatgcgtgagttcctccctcatacgtgatcgtcatattatgtaaatgctgctgcccgtctccgacatgcatgtcatatgcgatgctgattcggcctttttcttcaccgagatcagattgaatcgattttgtgcttgtttccagctcaagctcaccaaatgacattttatatttcgcaattgtggaagctcccgttatgaaacgctgattcattttaacagcgcctgacctcatgatcaggacttcgccttcgctcaccttcacaatcgtttttactttgcctaggtcgtgttcttcataataagatagatacactttatgttgttttacatagtaaaatccggtagtacggaattcgatgacttcatcatttccgtcatcctcgatcacagacttcacatggagtgttatcggtgtctcttgcttcattttgacacgtccttttcatcattccactttgacttgaatagtataatcattcagcttgtaaacttcaactgcttctatcttaccatcattgctcattagatttgaagataaacctcataaaaagcagttccttatgagaagagaaaatcatatcactatgtcacccaatccgtaaaaaacatgacagcagcttttcagaaactcacacagtctcatcgaagctgctgcgacttccagcaacatagattgtgcagcagaaatgccaacgatgtcaaagcgctgcgtgacagctataaaaacgtccgccaaacacacgtgatggctgctgtattatgccaagtcatcatattcggctgcgtgttcgaaatcgtcaaagccgtccctttccgctttcacacgccccttgccgtatcaatgggactcgcggtgttactgattttgtatttattgtattttatgcggacgtacttgctgcagcttttccagcatgtcagcctgttcagaaaagtgtttgcgggagcgctggcagcagcagggatttggtggatgctcagcttctctataagtgaacttctgtttctgattatcctgggtgccatccaacaaatcggatcatttatttataaacgacttttttatcgcagctctgcttctctcaacctgtgaaataagctacatcgcaatcgctgacggaccagtcccaaccggaatcaccgtcatggctgtataatcactcgtgcggtacacggttacggtattgtcgtcgggctgtgctgcataaatgtactgattatcaggtgttacggcgaggtcaaaggcgccgggcagagacacgtttgcaatgatcctctgtccagccgtattaactacgtataagttattaatgagaaacggttcactatatggctctagaaaataagccctagtgctatcgcgagaaaatacaatcgtcctcagcgtttcaaataaacggttgaagtcgcctcccctgcttaatggtgacaaactgatctccgttacacctttcggcagcagctcaccattcaacacatacgcaaaatttccagcgtaaggagtggcaattaaactgggaaattcaaatgtatctatgatactttctaccaactgcccagtatttacatcatatttatcaaccgaccaactgcttccattagcggtatagacatactgtccattcggatcaagagcaaagtctaaagcgccgggtatcggaatgacatcaatgaccgattgagaggccatgttgatcatatatatagatccggcggccatcacgtacgcgaactcatctgttgaatcaaatttaacctttctcggccctcctccaacagtgatggtatttatgatggttaatgttttattatctagcactgagacaaggttggtattcccatggaggacatacgtgaaagctttatcgaaagtaacgcctagattagttggcacgtcagaaaaagggattgtttttacaacagtgtttaaatctgaatcaataaccgaaaccgtgctgtctcctgaattggctgtaaacacatacgattgagggtctggcggtggcggtaaaacaagcgtcccggtcaccgtaagcggactgccgtagaaaggcggtacaatgagaagatcttccactgttatttgactgaaatcaggacagcggccagactgcgctgcataataaacaacttgatcaatctcttcagtatgaatcacagaaacagacccgtccccttgtccatattgatttcgtacaggcgacacactgacaagaagcgtaacggtcccttttactctcacggcatatcgaacaccgatatcttctggttccggcccagtctggattaagcaaggctcactgatacataataaatgatcagtactccatgtaactgtcgcagctgcttcggcagaatcaatggtgaacccctcgggaatgtcaatcggcacttgaaacggcgcttctctgctaatttcctcatcacaaaaacagaaacaattttcctgtaaagcagacagatcattctttttcatgaattcacgtccttttagaaatgcacagcatgcagttggttaaatcacaatatctcccggtgaaaccccaagagatatcacagtttccacagaataatcatccgtgttgtaaacagtgatgttctgctctaaaaaatgagcagcatacagaaattcgccattcggagtaaacgcaaagtctcttgccgattgcggaacatttcctataacgcctgcaccattcggactgacagcatataaattgccagtgaagctgtcatgtaaatacacctctgatccactcgtaaacattacatattggccatcaggctccagctcttgggtaatgctgatcgtaaacgtatttaagtcaataaccgtcaaataattgaataagaattcttgttctaacacatacgcatacctctccagagaatctgtttctatggatgatacgataagatctcgttcaatcgttcctgtgacttcaccggtgaataggtccactttttgcactaaaccaaaatcaagaacataggcgaataacccattgggatcaattgcaaaatcaaatccttccacaggaatcgacctatccacagttaacgtatcaattccaatcacataaatcgcagtatcgccgagaacataagcaaactcatgatttgggatacattttatcgatccaggcggctgatccagcagtatggatgctgtcactgttaaagtgtcataatcgatgacagaaatcacattattgttgaagtgcaaaacaaacacagcacttttatccggagttatttcaatacctgtcggccggtacggtagagcaatcgttgtcacaacagtatgagtgtttgtattaatcacagaaactgattgatcatttggattcgctgtaaacgcataaacgggttccggctcaggaacaaacacaatcgtgcccgtcaccgataaaggactgccatagaacggcggaacgacaacaaggttctcgatcgtaatgtcactgacatccgggcaatcatcgggttcatcagaataatagacgacttggtcaatctctgcattgcggatgacagaaacagacccgttcccttgtccatattgatttcgcactggtgagacactgacgagaagcgtaacagttccctgcaggcgcactgcgaattgaacaccgatttcatcaggctctggccccgtctcaatgaaacagcgttcaatgacacaagaaaggccgtctgcattccacgtcacgcctgcaacagcttcagccggatcaacgacaaacccctcaggcaattcaatcggcgcttgaaacatcgcttcacggcttgcttcttcctcgcaaaaacataaacattcttcttgtgcggctcctgctttttctttaaaggaaagcttgttatttctcatatcttcacttccttttcagacatacactgctcacgcagatacaacagaatatgggaaggtgtatttgtttgcttgtacaaattgtggggataatagtggatttttgaaatgatatccgcagacatgcggttttaacgaaagaaaacattgcggtatttttgcgctatccttccgaatgaaaatgataaaatatgtcatatacataacgtggaagggagggattcggaatagtggcgagtgttttatcatcttcagcggttggagaaaaaatcaacgaatggtatatgtacattcgaaggttcagcatcccggacgccgagtacttgcggagagaaatcaaagaagaacttgcaggtctggaagatgatcaggatcttcatctatactattctctcatggaattccgccataatctgatgctcgaatacctcgaaccgctggaatcgcagcggatagaagaacagccgagactatcggatctgctcgcggatattgataaaaagcaggcccggctgaccggacgtcttgattattattttaattttttccgggggatgtatgagctggaatgccgtgaatatctttcagcgattcagttttttaagaaagctgaatataagcttgattttgtcaaagattgtatcgagaaagctgaattttattttaagatgtcagagtcctactattatatgaaacagacttatttttctatggattatgcccggcaggcttataaaatttatcataagcaggaggcatataatataagggtgcttcagtgccattcattgttcgctaccaactttcttgacttaaagcaatatgatgaagcaattcagcattttaaaaaggcttatgccatggcagaggcagaacagcagcctcaattaatgggccggactctatataatatcggactttgttttaacagccaagaaaattacaaaccagccattgactacataaaacgggcaatagctgtttttgaagatgggaacatcatcacttctctcccgcaagcctatttcttaatcacacaaatacattataaaatcggaaatatggccatagccagacaatatcatgacaaaggggtatcttatgcagaggaggcagaagattccttatatatagtggagtatgaatttttggaatctttgtatgtcggtgagcctgatgaagaagcaatcatggaatgttttgactttctcagagataaatcgatgtatgctgatcttgaagattttgccttagatgtggcaaaatattatcatgaaagagaaaatttcgagaaggcttccgcatattttttaaaggtggaagaaacaagacagcagattcaaggaggtgtgaagttgtatgaaattgaagtataaattagcacttacttgcttggcaataagcactgtttttgtttcagccgacatcgcaagtgcaccgaaacatcaatttgaagttgctcagcgcggaatgatttaaatgatgattacttttaggcttgcaggttaaactgcaagccgttttttatataaacaactaatttgcaaaaacaaaaatcataccttaaaattcaaatgtgtaaaaagtatttgacacacatacatatattatttaaaataaatatatataaatttgaaaatttaaaataaaaacaaaaatatttaaggagggttttagtggataacaatattaaaaaacttagaacagcagctgatatttcacaaaatgatctggctaagctctgcaatgtgaccaggcaaaccatcaatgcaattgaaaataataaatatgacccgacattaagtctggctttttcgatagctcacgcattaaatacgggaatagataaagtattcaactataacgccaaaaaaaagtaagggagcggttcttatgaagaaaatggatgagatgcaaaaacaccaatcgggtatagccgccagaatagcatttagtttttatactgtcgctttactgatatggtcattaatagattattttaaaaacggaaatacaggatggcaatttccaatacttttaataggctgcgcgctctatttatggattcaagtttatcataatcgaaaaacaaggtaacaattccaatacacttccggaggattatacagcaatgtacgaatataagttcataaaagtagaagtaaaccgatggaaaggaaagcctaaagaagactataaagaaattattgaaaagtattcgcagcaaggatggaagctggttcaaatatttgctcctcctatttcaggttatggggcagccgattattttgatattattcttgaaaaaaaagtataaatgtttcagtacaaagaaagccggatcatacatatggtccggctttctttgtactgaaataagtcagcaaataccttaacggatttcacctcttaaatattttttcggaaatccgcaattcaaatagcttccaatatattttattatttaacttgctggggatattgaaaaaattggaggaaaaaatgagtctacttttaaaaacacaaaatagtaaagcgatttttacattagtagcatcaggaatcattgttctcgctcttttcagtataaaacataatcatttaagcatggatgtcatcgatattttaaacagagctggaataatagctcctagttggattgtcagtgctatcaccgcaacgggttcagtcctggctatcattactgttttaggatctcttggtgcaggcttgcctttagccgttttagaacaattggctgcagcaagtacagcagcagcttaacataaaacattaaattcaatatccctggcagtcccttaaacgaatggatgaaaatactttgtttaaaaagaacgttttagtcaaattgtacatactctgtctgatcttatttttaattgctttatttacagcatatttttatacagatcccgcttcaaatgtaaataatctaaatcgaaatatccgtccggatttttttcagattttctttaataatattaaagtagcgagtctgcttgtttttttaggcccgttgacgctgtcactcggcacgattgcagttttaattattaatggattcattttaggaaatgccataggaaacatcaaagacaatttaaaccttttactgcttgttataccccatggaataattgaagtcccggtattgcttcttgcagcttctgtaggaatgaaattaactttggatttattactcctcaaaataaatttaaaattcacttttaaatatattggtattatatttctcggtttaatgatagcagctatgttagaaacatttcttacacctatctttataaaaggagtctcttaggattatgcaaattgaattatcttcatttaaggaccgaaacattaattttttgtcctcatttttgttttatattatcgggttagctttttatttaagttccctattgccttttatgaaaagtttaattcccaaaaacatccctatacaagttgttgagcaagtaaaacatttagattatatcattgcgatagccgcactgtttcttttaatgttcggggtgatttttgaaggatttgtattatttctcattataaattttcttggcgctcaaattaagattaaaaccttttattccctatttatgttttctaacatcccggtcgcaattaagttttttcttatatcattcaaaaacattttcgcagaacatccaaatactagtttatttttcacaagtaatcatttgattttttctatctttgatttgttcaatattgcatacttatttcttttgtttattcttctgaaatggagaacaaatttgaactacctgacaatctcagtttttatttttacggcattcctgtatagaatgtttttttagcatatataaataaaccccctcaataggggtttttctttcatttcgttcactgtatacaattccttttatatgcttccgaaacaataccgactctagtactcacattccactttttacagagaccggctatgatatattcgacattacgctgcgagtagtttaatgacttagcgatctctttattaggtttttcagcaattatcagtttaattactgaaatttcaatcttttttaattccaattcattttctactgctgttttcattctaacttcctttctaaaaatgtatttactaaataataccctattatataatttttatcaataacatcaattattaatggtaaaataatatgttgcttttactaacttctaagtagtttatatacaatataaaaatcccccgcgtgtttcaagcgggggaaattcttttatttcacaaacccaagcagcatttcacgaatcatcttgcttgccgtgtttgcggtttgttctgagtggtcatagaccggcgcaacttctacgaggtcagcgccttttacattgacttctgagcgcgcgatttcatggatggacgcgagcaattctttagacgtgatgcctcctgcgtcaaccgtgcccgttcccggcgcatgagcgggatcaagaacgtcgatatcgatggtgacataaacagggcgtccggcaagctgcggcagcacttttttcagcggctcaagcacttcaaacttagaaatgtgcatgccgttttctttcgcccattcaaattcttccttcattccggaacggatgccgaatgaaaatacgttttgcggcccgatgagctcggccgctttgcggatcggagtagagtgggaaagcggttcgccttcataatccgtgcgcaggtcggtgtgcgcgtcaaaatgaatgatggcaaggtccggaaatttcttatacatggcttttatgacaggccatgatacaaggtgctcccctcccatgccgagcgggaactttcctttttctaaaatgctgtccacgtattcttcaatcatatcaaggcttctttgcggattgccgaacggaagcggaatgtcgccggcgtcaaagaaattcaaatcagctaagtcacggtcgagatacgggctgtattcttcaagaccgatagacacctcgcggattctccccgggccgaatcgtgaacccggacggtagctgaccgtccaatccatcggcatgccgtaaaggatggcgtccgcctctttccagtcggggcggcttgcgataaatacttttcctgaatatgcttcatcaaacctcatgataaaaccctcgctttcctgtaaaaaagcgcaagattcgctcctgcgccgtacgtttttatttgattaagtcgctcacaaatttcggaagaacaaatgccgctttgtgaagctctttcgtgtaatatttcgtgtcgatgtcaaagaaacggctgtcctccacttcaagcggatcgtactttttagaaccgatcgtaaatgtccacaggccgctcgggtacgtcgggatattagccgtatacaggcgggtgatcgggaagatttctttcacgtcacgctgaacgtttgtaatcagttccggtgtaaaccacgggttgtccgtctgcgcgacgaagatgccgtcttcttttaacgccttggaaattccggcatagaagccttttgagaacagattgacggccggtccgaccggttctgttgaatcaaccatgatgacgtcatactcattctctgatttcgcgatgtgcatgaaaccgtcatcgactctcacgtcgacgcgcggatcatcaagcttgcccgcaatggacggaaggaattttttagagtattcaataaccttgccgtcaatgtcgaccagcgtcgctttttttacgcttgggtgcttcagaatctctctgatgacaccgccgtctccgccgccgacaacgaggacgttttccggattcgggtgcgtaaataacgggacgtgcgcaaccatttcatgatagacaaattcgtctttttcagaagtcatgaccattccgtctaagaacagcatgttgccgaattcttctgtctccaccatttccagatgctgaaattccgtctgttccgtatgtaatgtctgtttcacctttaatgtaatgccgaaattcttcgtctgcttctccgtataccaaagctcgctcaattgtcatctccctttcaaggcttatttcatttattgtaagcgtctgtatcgcttttattccggttaaaatctcattttcacctaaggaaaaagtatagaggatggaggggaaaaagtaaagaagtgtccggtttgatatgtttaaaaaacccccttttttcacataataatagaatcatgaaaaagggggtccccaaaagtggataaagtatctggaaaacagctcagaatcacattcaaaatcatccgcgcctgcatctttctgacactgatcggcggaatgctggccggcgtctgcttcacatccgttcttcttgcagcgaaatggcagggggccccctccgtccgggttcctcagtctacgattctttatgcaaatgacggctcaaagctaggtgagaccgatttcggggaaaagcgctactgggtccggttaaaagatatcaatccgatagcggtgcaggccgccattgcggtggaggatcaaaacttttacaatcaccacggttttgattaccggcggatggccgccgccgcgctggctgacataaaggcaatggccaaggttcagggcgcaagcaccatcacccagcaatacgcgagaaatctctaccttgagcatgataagacatggaaacgaaaatggaacgaagcattttacacgatccgccttgaacagaactattctaaaaacgagattttagaaggttatgtaaatacgatatattacggccacggcgcatatggaattgaagccgcctcgcgcctgtatttcggcaaacacgccaaagatctgaacgatgcggaagccgtgcttttggcgggcataccgaaaggcccgtccggctattcgccatatgtcagcgaaaagaaggccaaacagcgccaggaaaccattctccgactgatgatcggccaaaaaatgatctcaaaagaaaaggcggaaaggcttaagaaaacgccgcttgcctatcagccgctgaaaaacaggaccgcagcgaaaacggcgccttatttttacgatgatgcgatgaaagaactcgagaaaaagctcggcatgacgcgcgaacagctcccaacgagcggattgcgtgtttatacgacgcttgataagcgcatgcagcggattgcggaaaacactgtggcacatacgatccgtaccggctctgacattcaggtcggcttttccgcgattgatccggcaacagggcgcgtgcttgcgcttctcggcggacgtgactacgaaaaaagcccgtttgaccgggcgacacaggcgaaacggcagccggcttccacgatcaagccgcttttgtactacaaagcgattcaaagcggctttacaccggtcacgctgatgaaaagcgaagccacagagttcaagattgacgacaacggagatacttattctccaagcaattacaacggctactacgccaataaaccgattacgctgcttcaggcgcttgcgttatcagacaacatttatgccgtgaagacccatctctttctcggcatgaataagctcgtgtcggcggcaaaggaattcggcatcagcgaacatttaaagcctcttccgtctctggcgctcggaactgaacccgtgcgcccgattgagatggttaatgcctacgcgatgctcgcaaacgggggaaaacaaatcaccccttcctttatcacaaaagtgacggataccgccggcaacgtcttgtatgaacagccgcgcggacatcagcagacgcttgataaaaaagccgcttttgtgacggcgagcatgatgacgggcatgtttgatcaggatttaaacggctatacttccgtcacgggacgcaccatttcggaccggctgacccgaacctatggcggtaaatcaggcacgacaagcgcagacagctggatgatcggctttaaccctgctcttgccgccggtgtatggacaggttatgacaaaagcagcacgattgattcagtagaagaaaaaagctatgcgaagacgatttgggcggactttatggagaaggcgctcgaaggagaaccggaaatagcgcttaaaccgccgaagggcgtcacgggcgtctatatcgatcccgcttccggctacacttcgggacccggctgcgccgcaaagcattatacgtatttcatcgcaggcactgagcccgcggatgtgtgctacggaccggaaccttctaaaaaagaaaaggaacacgcccccgcccgcaaagaagctccgcgcaaaaagtggtgggataagtggctcggcaaaaaagactgagcccggtgcattgcgcgccgggctttaatccgcgtcttcctcaagcacccacgggagcaagagtgaaaagtcgagatggataatagggtcaggaaaacccttcggtataaaaaatgttgtactcggcaatgaaaacgaaaagcggatatctcccgccctctcgatatgaaactttggccagccttccctaagcctgccgacaatcggatagctgcccgcataatgatgcaggccgttttcctttccatgctcccccaagtcgtgacagacagccggacgaatcccaaactgcgtaaacaatcttgttttctcggcgggaaggagattcaccgcctcggaaaagttccggcagctcccgcaatcgcaaggatcaggccatgatttttcgtattgttttctcgtttccgccgcatctgcttcaatgacccatggcccgttgtcaaagacggtgaacatgatgaaacctccgcgtaaacatgaaaaaccccgagtcttggttcggctcgggactttccatgtcctgattctgtatcaacagtttactcagtacaattgcaaaatagtgcaaatatttataaagttcacaaaaagttcacaaattatttttcttccggaagcagacctgttttcaattcatcggatgaacgttcccagagcccttggtcatgcttctgcagaaattcagcaagcacctgctttgagctggcgtccattttgtccacgataatgcagcgcttcattgatttatccattaaattcacatgctccggcaatgacttatagcctctgcggatacttctgtctacggtcatttcacaagccgtcacacccgcgtaataagggccttcttcttttctgtcgatggtgacccacacgagccagtacggttttccgttcggcacttcatctttgttcggcaggaatttgatgcctttttcaacgacactgcgggcatgcatggcgccgatgtcaacgaaggcttccttctcttccacatcgacaaataccggagaaatattgtcaaggctcagcgccccggcgccaaaaccgccatgtccgtcggtcggatcacttttaataatattaaatccgattgttttcttctttttttcttccatgaaaataccctcctacaaaagcggttgaaatataatggcaaataccttgagaatccagtctctcccctcacttaacagcggccacacgacataggagccgaccggtgtcacaaacagcacgagaaacacgataatcccgtagctctcaaactgagtcattttggcgcgcacccgcggcggcacgagatcctcaataatccggtagccgtcaagcggaggaagcggcagcaggttgaataaacacagcgcgagattcagctgaatccaaatagagaaaaagcggtcaagccccatgctgaatgcagaaagcagctccattccgtaagcatgcatcaacactagcaaaaagaaaccgataaaggcaagaagcaggttgcttacaggcccggcgacggaaaccagcactcccgccagccgcggtcttttaaaggcgcggcggttcaccggcaccggacgggcccagccgaaacccgcgaccaaaattagaatcgttccgaaaacatcaagatgtttaatcggattgagcgttaatctgccctgtctcgccgcggtatcgtctccgaaccgatacgcgacatacgcgtgcgccagttcatgcatcgtaaatgccacaatcagcgtaatcacgacatagggcataagctccagcggataatataaaaatctgtccaaatgtaaaaatccccttttttaaaaaatgcaagattgtccttcattcagtatactataagtgacctctcttccaaagagaggaaacgataaaggaggatcagcaccatgccgctcgtaaccgttaaaatgcttgaaggccgcacagatgaacaaaaacggaatctggttgaaaaagtgacagaagccgtaaaagaaacgacaggcgcagccgaagaaaagatcattgtcatgattgaagaaatgagaaaggatcattacgccgtcgccggcaaacggatcagcgatacggagtaatccttgataatggccggcgctgctatgtcaggccggcttatttcattactttttcaacgaggctgaaaaaggtattcttttcttcttctgttaatgcctcgaacagctcgtcaatgagcatctgccggttttcaatcatttgcatggccgccatttttcccgattcggaaagcgtcatccataccgtgcgtcggtcttcgttatttctcgacctttccacgaaaccctctttttctaaatgattcagagcggttgtcgtggctgaaggcgataatgtgacttcctgcaatatatctttaatcgtgcacgtgccgtgccggtaaataatcctgagaataaatcctctgatattgtttatactcttcggaattgtcgcctcatcaagctttttcgtgctctttaaatatttcgtgagcgcgtaatccagtacatttgcttgcaatatatcgtactccatgcagaaactccccatttcaagatgcatccatcatcatttgattgttttttattacattttactgatacctcgcggggaaagtcaaaatttcggccggaaagcccgcaacttttatcctgccctatacagactattatctcctgcttttttacccatcccttttatgcaatgctggttttatagacatgattcaggtaaaatcattaagggtgactgcgtttgacggaaaggataatctgatcggatgcggcagacaatatgactggaaaagaaacggaacagacggggaaacagaacacaggattgtcgattacacagaagatgtgacacgggtaaaagccaaagagcccctcttggcttttgcttttggatggagggatgcgtgttgcggaatatcctacaaaaaaaagacatcacccagctgcttgaacaaagcagaaacaggcagactgccaaaacgatgggtggatttgatttaactttactgggcatcggcgccgtcatcgggacgggcgtcatggttcttacaggcattacggccgcgaaaaacgccggaccttccgtaatcttttcttttatcattgcagccgttgtctgcagccttgcagcattatgttacgccgaaatcgcttctgttctcccggtttacggaagtgcctatatttactcttataccaccatgggagaaattgtcggccatttaatgggctggacgctcttatccgtttatatggtgacggcgtcggcggtggcaagcggctggtcaagttattttaataatctgttagccgaaatcggcatgcctttgccggacagtctgctgcacgtgccgagccaggggggcatcgtcaaccttcctgccatcatcattactctattaattgccgtcgttctgtcacgcggctccaaagagagcaaaacctttaataatataatggttctcgtaaaaatcggaattgttttgctgtttatcatcacaggaagcttttttgtaaagccgggcaattggcatccttttatgccttttggaatcaaaggcgtcattacgggggcttctgccgtcttttttgcgtttctcggatttgacgcgatttccgcttcggctgaagaagtcaaaaaaccgcagcgcaacctgccgatcggtattatcggttcactggtgatctgtacattggtatacgtcatcgtctgtctcgtcatgacggggatggttccgtattcacagcttaatgtgccggaagccatgtcttatgtgttgcagtctgtcggacaaaacgcggtggcgggcgttatcgctgccggtgcggtgatcggactgatggccgtcgttctcgcccatacctatgcggcgacccgtatatcttttgcgatggcaagagacggaatgctgccgaaagtctttaccattgtcggaaagaaatcgggagcgccgatctttaatacgtggctgatcggactgatcagcgcctgcatcgcgggttttgtagatctgaaagagctgtcggatctctcaaacatcggcgcgctattgacatttgccatggtcagtctgtccgtgctgattctgcgccgcacccataaggatctgccgcggggatttaaagtgccttttgtacccgttctgccgattttggccattatctgctgtttgtttttaatggtcaatctgccgctgaaaacgtggctttattttgccgtctggctgatcatcggcgtcatcgtttactttttatattcgtacaagcacagcaaattgagacaataaacaaaaccaggcccgctttatcgcggcctggtttttttcatcaaaaaagacgaaagccatcgcctttaacaaatgtgtttcagctcttctatgtagtgaagcgcctcatcatattcttcatccgtatatttctgtttgctttttatcgtaaacactttctctttcttttcctcagcttcaaggccgtcaaaatacaaaatcgtagacaccagctccaaaaaccgggatgagcggctgttgacgctgtcgatgtacttcttcatatccggcatcgtaagctccgcatgatgtaaaaactcggctcccgtctccgtcagcgagtaccggtattgaaagtagccgccctttttttccttcacctcatccagaaacccaagattgcacagctcttcaattcgaagcgtcagttcttcggaatacgggccgtaaaaatgaaaatcatatttttcgtagaaaggatactgcattttcttcgcgatataaatgattttctgcagctttttccgcccgatgatttctccagaatccgagaacaccttcatcagttttgcatgttctttcaacaaattcccgacatctccttttccttctttaccaaaatccttctatgtcagtcccagcagctgccggatttttaattttgcttcagggttttctgaatcgtcacaaatgaggtccatcggatagtagagcttatggtccgtccggcgtttgcccgaaatggattcgacaatggcggactgcctggacagctctttgatctggccgttctgcgttaacaggtgaatcggcagacgctcctcctcttcacccggccggtaaaaatcatacggcagatccgatgaagaatcgaccactaaatagtaattgggatcaattcccgcctctttaaacagagcggtcagttcaaaataagccgacatttcctcattggggttaaattcggcatattgaaacagctggcggttaatgaagcggcggcacaagtcggacagaatcgggtcctcttcttcttcccaagcctggaaataatataaaatgatggcttcatcaagcttcagataatccgcaagcgtcagcttcccttcaaaaatggaataaaaatgaacgggagcatgagtgaatatatacccttcttcatggagctgcttcgcacggtggagaattttcgtcaatatgacttcagcgcttctcgtcacgggatgaaaatacacctgccagtacatttgatagcggctcataatatagtcttcgacggcgtgcatgccgctttgcttaatgacgatctggtcctctcgcggacgcatcacccttaaaatccgttccatatcaaaatgtccgtagctgacgcccgtatagtatgcgtcccgctgaaggtaatccatcctgtcggcgtcgatctggctcgaaatcaggctgaccacctgtttgtttttatatgttttggcaatgacttcggcaacatcctgcggaaatcccggtcccgcctttctgagaacctgattcacctcggtgtcgccgagaatgatttccctcgtatagtcttcatgatccagatgaaaaaccttttcaaaggaatgcgaaaacggcccatgtcccaaatcgtgcaaaagcgcggcgctgagacagagttcgcgttcattgtcatcccattcaggacgccctttaaaaacatcatcaaccattcgtctgacaatctcatagacgccgagagaatggttaaaacggctgtgttccgcgccgtgaaacgtcaaatacgtcgtaccgagctgtttgatccggcgcagccgctgaaattcacgggtgccgatcaaatcccagatcagcttgtcccgcacatgaacatagcggtgaacgggatctttaaacactttttcttctgataattttccgtttggatacgccatcgtcattccctcttttttttagccgtgattctattatatcggctctgtaatttgaaaacatccttgaatttgtctggcgttttgttccagttttccgtcattgattttttgaagcaaaaaagcctgacccatcgggcgaggctgtcgtaaaatacacatttactttttgatcttctttttcactttctcaatcagctcatcctcagtcggcgccgacagcgggcggttgtttacgaaagcaaacgattttttgcgtccgggcccgcaatatgactgacatccgacctccacttttgcatccgggtcagcttctttcaaacgcggcagcaatgtcttaatattggtggcctggcaatcatcacacactcggaattcattagccatgatgtacgcttcccttcattcaatgttcctctatgttaaatcttaattttaaaaacgaaaaaaatcacatcacatctcattgtacaaggattcatcttatcctgcaaggctctgcgtatctctcattctttcagccaatttgtataaatattttccaatctggacattctaataccatcaaagatattgggggttgagaacattgacaaaacaaagacaggacgcctggtcggaggaaaatgacctgctgcttgcggaaaccgtgctccggcacgttcgggaaggaagcacgcagctgaacgcctttgaagaggtaggcgataaattaaacagaacgtcggcagcgtgcggtttcagatggaatgccgtcgtccgccatcaatacgaaaaagcgcttcagctcgccaaaaaacagcgcaaacagcggatgcgcgcgctcggaaacggccagccggccaagaagaaactattatatcagccgcctgcgccggatgcggacatcatgcaggaaaccgcagccgaagagacggttcaaacggaagcgccaaaagaggatcggcaagccgtcatgtccggcgaacatatgccttatgtcgatgaaagcttcaaggaagagttagctagtttatcacatttgctggcgcctcagcagccgagccaaaaggcggagctcacaatggcagacgtcattcaatttctgaagagctatgaaggcagcggaaagcaaacttccgccctgcaaatggaaaatgaccgtttaaaacgggaaaaccaagaacttcagtctaaaaccgagcagctggaagcggccgtcgaaaagcttgaaaaagatcaaaaaaccattcaggaagactacgaaaccttggtgaaaattatgaacagagccagaaaactagttttatttgaagacgacgaacatgcctctccgtccttcaaaatggaccggaacggcaatttagaaaaaatggccgaataacggaaaaacccctttccttgtcatggaaaaaggggtttttgccatttgtcaatgacgcgcatcctgatctatattaatgtaaacattgttcaggaggccttcttcccgcaagggctgcgcatctcggtccccgcccgcacataagcataaagattcaattcctcatcccaaatggttcttgggaattattgatcgattagctactgtgcaatacactgtatagagaatacaattattagatatgatgggaatgatagtaaatgagtagccaattacgaaaaggagcgttggaactttgtgtgttgtccctgcttctttatgaagatttatatggttatgaattaatcaagatcataagtgaaacgttccctgtatcggagggcaccatctaccccatattacgaagacttacaaaaaacaactatttaaaaacgtatacagcagcttccgatcaaggcccgtcacgcaaatattacaaggtaacagaagaaggcgccttttatcatcaaacattaaaatcggaatggcttgacctgtccgaaaaagtgaacagcatcattaaggagggaaaatgaatgtgtaaagaccaatatttaaaacatctccggcgggaaataaaagatctgccggaacttgagcaaaaagagatactcgccgatatcggcgaaatattccaaatgggcggcgctgaaggaaaaagcgatgaacaaatcgccgacaatttaggaaaccccaaaacacttgcgcgcgccttaaaagcggatattttcatcagtgatgccgaggagcagaaaacatggcgctcctttttcaaagcattcggcctgatgctggggatgggcatgttcaacttcatgtttatgctgacaccatttctttttgcctctgttgcggtgttaagtttgatggcgatcggcctgatgctgatgaccggatcattctttctcctcgtaaaagtgccgattgtaacagccatttttaacggatgtatggttcttggagcgggtatggcggtgtttatggccggatttgatctttcgaaactgatattccgcatctttttgcgctatttcaaatggaatgtcagcgttgtaaggagggaaaccattgaatcgaaaaatgtggtatagcattgctctcattttaatcgctgccggcctgatcggaagcatgttcttcggttttgacggcttttaccctaaataataaggaaggtgtgcaaatatcatgactgaaccagccctgatattaaaagatgtctctaaaacaatcaatcatacccctattgtacagtcaatttctttcgatgtgagaaaaggcgagattttcggccttttagggccgaacggctcaggaaaaaccactattttcagaatgatcgtacagcttattaaaaaaacagaaggagccatttcattcagaggcagaccggacagcgactttgaatattttatgagacatatcggggttatcattgaaggcccggatatgtatccgaatatgaccgctttgcaaaacctaaaatattttactaaactgcgcagcacctcgctgcgaacggatgaccttatgaatacccttgcaaaagtcggactagagcaggctgcccgcaaaaaagtgaaacatttctcattaggcatgaaacagcgcttggggctcgcttattctcttcttcacaatcccggattattaattctggatgaaccgatgaacggcctcgatcctaaaggaatgaaagaattgcgcaccattctttccgatttatcgaagcaaggggtttccattttattatcaagccatttattgtcggaaatggaggagatttgcgatagggttgcctatattaaaaagggacggattttaggaattgaagacatgaagaacagacatgaccttggtcagaaaaagctgtttaccgtcacggtcgatcatccggcaagggcgaaagaaatattagagcaggacggtattcttcaagtacagcaaaaagacagccgcatcattgaattggaagcggaagaagataccatcccgtatgtcattaaatctttggcagagaaagagattctgatttcccgcgtttctgcaagaactttgtcattggaagagaaatacatgatgattacagatcaggaggacgcggtatgagcatatttcatctggcgcagaatgaattcataaaaataacccgaaaaaaaggcacacttttatctctttttttcctgtttctcatcgttttgctggccggccttattatgaatcatgagttagatgcttcctcggataacaattggaaagaacggcttctcgccgaaaaaaaacaggaagaaattgataaacccgctgaaacaacaggcgtttattattctgctgatgttaagaataaagactattatttggagcataacatcaacccttatgaatggaacggctggaggtttttcggcacggttacttcaaacgggcttgagattttcgtcagcttgaccgcgattttaaccgtcagcggggttgtttctaaagagtttgcccttgggacgattaaatttatcgctacaagcccgaaccgaagatggcggattttaacatcgaaatttctggcctcccttctgtttaccggtatgatttacttattttactgtgtgagctgtttgctgatcggcggcgtgttattcggtttttccaatgcttcatatccgctcgtctatactcatttaaatgacagtctgtataccatcagttcaatcaaagcatccggaatcattttgcttttgcgtttcatatcaattattagcattgtcaccattgcgttcactttgtcagtattgtgcaaaagccaggcgctctccctttgcttatccattttactgctgtttgccggcagtatattgggcggaactgatttgcttgcccaatttacgtggtataaatttacgctctttccgcatttaaacctcgttgcttatgtaaataaaagcgcgggtgatgcgatttcaacgttaaacatcccctattccgtgacagttatagcgatctactttcttatttgtttattgatttctttttccgtctttcaaaagagagacattacagcatagacagagaggcggcggcataatgagcggacggcaggaaatactgacggtccagcaatttgccgctgaccgcccctcgatccatcgctaatggattcaaataaccgaagctcccgctgcttcgctgctgaaagcgtagaaattcccgcccttcccgtataaaaagcgcctcatcgaatcggagaaatttcataatggcagtgtattttgcaacggcgtcaatgtgatactttctgcactcggctaacattaaacctgaaaaagcaaagtctgatgttttgtaccattccgtgagaaaaggctgcaattcattcatttgcaaataagtgacggcataaagggcatccgcctgttcttgctggatgctgcccggtgccatgagcaaatcggcctcacgtttcatcccggtttctaagaacacgattagttcttccggagtcaccgccccaaaataagcccctaacaccatgaggatcatagaggagggctctgatttcagttcctcttgtaaaccgcggaccatttgttcaagtccgttatgaaaaaagatgctttttgcggcatctatcctgcggtacacatgatacgcatacgcgaacaggaccggatggcattcgtgtgttttttctccgaaataacggtctaggaatagaataacttcttctgtatcctttctgctttcaaaacgatgacatgccgctaaaccgcaaaacaggtgcatgagatcatctgcttccatttcttccggctgcagctgaatgttcttccaaaaacccagcagccattcttctgttttttttatattaaaatgttccttgactatctgcatgttccacactccagattcaggatctcaatcgccggcagaagagccggagcacaatgaatggatggattctcgttatttatatgatgaagagccgcttgacagccataaaaaaatggatcgatacatgattggataaataacatattgcacagctgtttcatttttcggctgccgagacaaaacacaagccatttttgaatggacgccttcaagccgggatgaagcagatgctctccctcattcaaatgaagaagacagtactcgacaaactccagctcgttttcagctgttcttttccatgcgtcatggagcaaaggctgaaacatcgaattcttgtaaaagcgcactttttcatggtcagttgacattcccagctcgctcagcaaaccgacgaattcggcgtatttaaaataaggccattctttttttataagatagccgttttgcaatccgtgacgtatgacctgatcatccgaatccattccctgcttctttttataagcttttgccgttaaatagatatgaatcaactcattgacaatggccgtgttacagtgaaacagatcttcccagcatgacttatcaacgaaagcggaggcaatcctttcagtatgttcttttacagcggaagaatggctcgtcttcctgtagtacttgcagaagccggcaaacagctgaatgctcttttgatccggaagcgattgttcagcaaaagataataaaaattgatctgtctcttcagctaatctattcaagttaatcgttcctttctgctctaagacaggcatgcgcggcaccagcggcgacaagtgttgtatgatagcaatgtttgaacacatcttctcttcgctgttcacctgtcaaaccgggtttatgttgataggtgatgctcgggacattcccctctttcattcggccctgatagattttattccaggctgcttcatagagcggtttatggttgtccttatccatgtcgatatgtaaaaaagagctgcacatcaataattcactggtaatatctaaattctcaagacagatatagatcccgagaaatttcaggaccttttcttttaaggacggcagatgatactctttatccgtaagcgaagaacatcccatgtctgttatataaaaaatcgtatgagtgatgctgtacgcatcatgatccgtcatatatgtatttgggatatcctgaccagctgctgtgtagtgatataagtcagaaaaatccgttatttccgaggttacgcctgctctttgcagactgtacttcagatccattttccgaaagggaactttagcaaggctgcaatcaaaacgcgctgccgtgaatttttccagctcccatatcaccgaagcccgtgacggatgatcagtcaaggtaagaaattcacccgcaatagccaatccggcgagaccgtccggatcaaaatgaataaattcttcaagctgatcattacggagcctttctgtaataaactccgttaaaacagcaacttccttatcatctgcctgatttctgatcaggtaattggtaagaaaaatgagttctataaatgttttaaggcgccacctgaaatcatttgctactttatgattcatatcgaaataatggatatttttaacaatccatgacagtgctccccgcttaatttctgttatatactcttgtgtcacactctcaccgcctcgtctcagatgtgtaggctccaaacagtgattatcctacttttgagcggctaaatcagagaaattcaaattcgggttttgattgtcttcttggctcggcactacaagcacccagccgctccaagcgaaagaattgcctgattgttccgcatctccggctaacaaatgtgtcgggatcgtgattcttttttcttcttttatttttttaaagttcatatctccatctccttcagtttatagcattatttggaacctacataaatatattaatcaaataagttatataatgtaaactagttttcatataacacttcttttttcactataactaaatagtatataattaccaaaaacaaaaaaagcccggacttagtccaagctttcctgcgtgccgaacaccttctcattccgttccagcattcgggtcagatttttttcaaataccatttcctcttccggcgataacccggctgcatacagacgtccgctgagttccttcagttcagtcaaaagcgccagcattaagtcttgcacggtaatgtccgtttgcagcaattcgcttaatgaagccatcgtttcgggccggatatcgggatatacgccttttgtatcgttgcttttgtcttttaaagcggcttgatagaaacgtctgatcagatcggcgcgttcgcttccgcttttatcggcgcagaggtaaatctgaaccgcggttccgccccgcaggcgtctttgtgagattcccgcgaattttcgtccgccgatgctgagatcatagctgcccggacagtacgatcctttaatttcatatgcttcaatttcggcatggtgcggacgcagcacccgccgcaccagctctgtcatcgcctcgtagcctctgtcgatgtcgatgccttttttctcgtcttcaaaaataagcgagatattcaatacgccttcgtccagtacgacggcgaggcctccggaattgcggacaatgacacggtagccttcgtcctccagcaatttcacgccgtcctctaaaaacggcaggcgtgtgtcctgaatgccgagcacgatcgtccggtggtgcacccaagagcgtgccgtcgcaggcgattcccctttgcctacggaggcgcacagcgtatcatccattgcgaatgactgcttcgcatcaaaataagggccgaggctggattggtcaatgattctccagctcggctgcatcagtaaatcaatcggttgctttcccatctatattaaatccctttcgtcataggctttccatgcatttattatatcactccgcttgtgatgattgaaattggcttttcaatagagcgatgaagatttctttgttttttgtgttctccataatggaagattggatgatagacagtttccgttttaaggagaacccttttacctcaagcacggaaatgctgccgtgaagcagatccttttgcagcacgctttttgacagaacggaaagacccattccgctgatcacggcttctttgacgccctggttgctgctgatcgtcatcatggatttcggccgcagtccgtttgattgaaggacatggtctaaatattccctcgttcccgaacccttctccctcgtcacccacgcttgattttgcaattctgcagccgggatgttttttctgccggcgagcgggtgtccgttcggtgcggcaatgcacaattcatcctccataaacggctgaatgtccagctcgtttttccccgtatgcccttcaattaatccgatatcggcttgaagcatccgaaccgcttcgctgacctcctccgtgtttccgatcatgacgtccaggttcagctcgggatactcgttatgaagctttgcgagaagcggcggcagaatatattcgccgatggtaaagctcgcggcgattttgagcttccctttgacataatgatgatgggcgtaaatttcggatttcgcctgttcgtacaaaaagaccatctgcttggcgcgctgatagagaatgtcccccgtcggcgtagtcgtaaagtgcttcggagagcggttcagcaaggcggtttgaaattctttctccaggtttttaatgtgaaggctgacgctcggctgagaaatcatcagcttctgcgccgcctttgtaaagtttttttcttccacgacggcaatgaatgttttcagttccccataatacaaaaagcatcgcccctaatcattatttttcctaatcgtttagatcatataaatatattttactaatgattaagaccgcagtaaagtggagttatcaagataatgggaagtgactgagatgaagatggtaaaaggtgtttcagttaccgcaggaattgcgtttgcggctttctatgtcagccgcctgccgtttttgcatatgttcggaatgcttgtccttgcaatgctgatcggcatgctctggcgcgccgtattcggacagcgggcggcattagagccggggatcgcgttctcaagcaaatacttgctgaaagcaggcatcatcctgcttggcatgagactgaatctggcggatatctatcatgcgggctggcacgtatttgcaattgccgtctgctgtatgatgtttgcgggtgccgttgtatacggactgtcccggctgttccgtatagatcagacactcagcacgctgacagcctgcggcacagcgatctgcggagcggctgccattgccgcgatcgcgccgcagatcagatcaaatgaaaatgcagccgccatcagcgcggccgccgtttcgttattaggaaccgtttttactgttgtatattctcttgcttatcatggattgggcttttctcctgcggcttacggagccttttgcggggcaacgcttcacgaggtggcgcatgcggcggcggccggcagcgccggaggaaaagcagccgtcgagatggcggtgatcgtcaaactgacccgggtcgcgctgctcgtcccggccgcattcatgctcggaatgcgggcgcgccgcagcggaaagtcaaagacggcttctgccgcttcgctccccatcccttggtttatcttcggatttctcggaatgagcgccatccatacatcaggcgttatttcagcttcgttttccgcgtttcttgttcaagtgtcttatgttttaatcggcatggcgatggcgggtctcggtttgaaagtccatatatcggcgtttcgtcataacggctggcgggcgctcgcagcaggcttgatcggttctctctgtttgtccctgttcggctgggccgcagtgacgttctttctataaaaaaatgccggccctcgtaaaggccggcttttgcggattacagcgcttgagcagccgtaattaacgcaagattgtagacgtcttccgcattacatcctctggaaagatcgtttacaggcatattcaatccttgcagaatcggtccgaccgcttcaaagccgcctaagcgctgagcgattttgtagccgatgtttcctgcttcaaggcttgggaatacaaatacattcgcgtctcctttaatgtcggaatccggcgcttttttctcagcgacagacggcacaaatgcagcgtcgaattggaattcgccgtcaagcgtaagctcaggcgctttttccttcgcaattttcacggcttcagccactttgtccgtctcgtctgatttcgccgatccttttgtagagaagctgagcatggcaacgcgcgggtcaatgtcaaacatttgagccgtattggcgctttcaatggcgatttcggcaaggtcctggctgtcaggagaaatgttgatcgcgcaatcagcgaacacatactgctcgtcaccgcgggccatgatgaagacgcctgatgtttttttcacgccttcttttgttttgatgatttgcagtgcagggcgcaccgtatcagcagtagaatgtgcagctccgctgacaagtccgtctgcgagacctttgtacacaagcatcgtgccgaaatagttttcgtccagcaaagctttgcgggcctgttcttccgtcgctttgcctttgcggcgttctacgaaagcctgaacgagttcttccatgccttcatatgtatgcgggtcaaaaatgtccacgccgtcaagcgtaagatttaattctttcgcttttgcttgaatgtcttctttattgccgactacgatcggctttaataccttgttgcccgccaagttgttgaccgcaaccaggatacgttcgtccaacccttcaggaaatacgattttcacatcttttcctgcgactttttcttgtacttttgtaaataaatctgccacgatataccctcctctatgttgacaaaaaacgcttacttttacagcatactcttcttccagctaaattcaaataaccaacttctattatagcgctttcaaaaagaaatcttatttttctaactaatttaattgaccgtttgttcacggcatagtttctgacacaaggcttcggattattcaaggtttctccacagccgaaacggttaaactgtgatatagtgaaggcatcaatgtaatgaaaagatataggagtgaagatacatgagtgagcagcaaaaaacgaacgaagccgcccaaacgcttgacggctggtacgcgcttcacgatttccgcacaatggactggacgtcatggaagatgttatccagcgatgagcgcctgtcgattattcacgaatttacgggactgcttgaaaaatggggcgtcgcccaaaaagaaggcaaaggctcgcaaaccatctacagcatcgtcggacagaaagctgattttatgctgatgattcttcgcccgacaatggaagagctgaacgaaatcgagcttgaatttaacaaatcaaagcttgctgaattcacaatcccggcttattcttacgtgtccgtggttgagctgagcaactacctcgcaagcggagaaggcgatccgtatgaaaatccgcatgtccgcgcccgcctgtatcctgagctgcccgaagcgaaatacgtctgcttctatccgatggataaaagaagaagcggcaatgacaactggtacatgctttctatggatgaacgcagaaacctgatgagaagccacggcttgatcggacggagctatgccggcaaagtcaaacagattatcacgggatctgtcggttttgacgattacgaatggggcgtcacgctcttcagcgatgacgtgcttcagttcaaaaaacttgtttacgaaatgcgctttgatgaagtcagcgcgcgctacggcgaattcggttcattttttgtcggaaaccgcttgtctctcgacacgcttccgaagtttttgcacgtgtaacacccacccgcctgtccggcgggttttttctttgtcagaatttaaataaaatttgctatttttatcatttttttttacgatgtaaaggagattccattttggtaaaggggtgcagacagttgtcaaaacgaaccgcgtttattatgggagccagtcaggggatcggcaaagcgatcgctctgaaactggcggacaatggctttcataccgtcattaattcacgagttcccgaaaatatcgaatcggtaaaaaaagagatcctcgccaaacatccggacgcgggcgtcaccgttctggccggggatatgtcggaccagaagacaagagccggcatttttgaagagatcagatcacaatgcggacggcttgatgtattgatcaacaacattccgggcggctcgccggatacctttgaaaactgcgatatagaggatatgacaaatacctttacgaataaaacgatcgcctatatcgactctatgaaaacggccgcagcaatcatgaaacagcacgaattcggcagaatcattaatatcgtcggaaacctatggaaagaacccggcgccaatatgtttaccaacagcatgatgaacgccgctttaattaatgccagcaaaaacatcgccattcagcttgcgccttttcacattactgtcaactgtctgaatcccgggtttatcgccacagaccgttatcaccaattcgtgaagaatgtcatgaagcaaaacggcatttctaaagcggaagcggaagaacggattgcatcaggcgtcccgatgaagcgtgtcggaactgcggaagaaaccgcggcgctggctgcctttcttgcctctgaagaagcctcctatattaccggacagcaagtatcagccgacggcggcagcatgaaaagcatataataaaaacatcccgctctcagcgggatgtttcttgtaatgaaggaaaggacaaaccgagcttttgaatccgcagcacgaattcccttaaatcgccctgcttggccaccattgatattctgacataacgctttccgccgctgccgaaaatctcgccgggcgtcacgacaacatgggcatgctccagcaaatagtccgaaaactggtgtgaagactcgaattcattcggaatttcagcccatacataaaaagtccctttcggtttttcaatgctccagcctaattccttttcacataacgccgtgaaaaagtcaatccgttctttatatgtgcgcttcagacgctcggtatgctcaggatttcctgacagcgccgccgctgccgcctgctgaaggccgccgaacatgccgacgaagacgtgatcctgaaactcattgaccgcatgaatgattttctcattccccacggcaaatgccattctccagcctgccatattgaaggttttcgaaaatgaataaagctccgcgccgaccgttttcgcttctttcgcctgaagaaagctggccgggttctgatcaaattcgaacgcgccgtatgcaaaatcgtgaataaggtggatgtcatgtttttttgcaaacgctgccgctttttcataaaacgcctgatccgcagtcgcgcccgtcgggttattcgggtaattcaaaaacatcagcttggcttttttcaggacggcgggatcaatccgctcaaaatccggcagatagccgttttccggatgaagcggcatctcatgcagctccgctctggccattgtaatgcccgataaatactcagggtagccggggttcgggactaaggcaatatcgccgggattcagcaggcattgcgtcaaaacgtacaaaccagctttccctccgccgaacagcgcgacttctgtctccggattgaccgataccccgtactctctctcataaaattccgcgatggcttctttcagaaacggatagcctctgaacgggccgtatccgtgatacgaaggattcagcgcagcctcccgcaatgtttcaacgatatgcggcggtgtggggagatcgggattcccctgcccgagattaatgatctgggctcccgttttctccatctcttttaccttttgaaaaacgagcgaaaattcctgtttcggaagtgtcttgatgacgtcggacggtatgatttccatctgaaaggctccttataaatgaatttgctctgattcgttattccgttctgaaaaggatttattgaccagttttgtatgcagaaacagcccgctgaccaaaaggacgataaacgccatgatgactgccgcgtctacaatgttgatcagcatggaaccgacggcgatgcacaatccgatggaagcctccgccaccgaaaaaatccggccctgaatctggttcgccgcgttctcctgaactttgaccttcgccagcacttcaccgtattccattgcgataaagaaaagaatggcggcaatgactgacacggcgaaaatcggggtaaacaaaaacagcgcaagcgagacgatcgataacactgtaaaatacatcagccctttattattgttaaagccccatttgctgacaagagcggcgccgataaagccgccgaagccgatacagaacgtcaggatgaaattgccgatttccccgtcgcctaaaaagcggctgacaatcgggaaatagctgtagacgacaccccacaaaagcgccatcgtaatcatcgtgaacatggcgtttaacacaaaagcatttgttttgatttccttcaggccttctttaaacgactgaaaagcttctctcacgttttctgactgaatcggcacgtattgaagcttaatgcggctgatgaaaaacgcggagacaagataggtcaccccgttaaacgcgacggcaagctccacagaaccgcctaacagaaaaagtccgccggctgcagcgccgacaataatcgaaatcgtcgtggcttttgcaaacaaagtgttgatatttttaatatccgcttctaaagacgacatgaccgcgagacgtgccgggttaaaaaacacgccgcttccgtaagaaacaaacagcagcgccagaaaaagcagcggatattcgcctttcgggagaaatgtcagccccaaaaagatgacgcctctgatcacatccgtccacagcatgattttcaccctgtcgagccggtccacgagcacgcctaaaaacggctgaaacaccatcggaatactgcggaccgcgatgacgccggacgtcacccagtagtcgtgatagtatgtagacaaaatgagcagagccgggagaacgcaatagtctcccataaacgaaagcgcctgcccgaaaagcaaatacttagagttcggtttcagctgtttcataccggtaacgcatactttgcagtcagcttcgcctgctgctgaatttgtttgattgattcggccacgtcacccgaattgcttcctttcagctcgaacgccgcaatgctgttgaacgcttcgaacagccgcagatccacagatgtacccgcctcggccgccgagaaagaaacgatttcggtgtctccctttaagacgccgtcgggaatgtcaatgctttcaatgacgaaatcgacagccgtctcaggcagctggccgttttctttgaaatgctgaggatacaagtggcagtcggcgacatagcatggctcctgctccaataatcctttcggcagatcggcttcttttccgaaacagagaacatccaataacagctgcgccatatcgacgccgaagacctttttaatattcggaatcatgttccagcccgcaaatcgtgccgctgattcaatcagtccggcttcccggtttttcattaatttaatctctgtatgtgttgcgcagttttcgaggccgagtccttcattcgcctttttggctgcttcgacgattttccgcttcgcgtcatcatccaggatggacggcgtaatatgcgatgtctccgtgaatccgatttgcggtgttttatcatgaatcgcgacagggaagtattctccgtcggccatgatgccttctatgctgatatagtccgaataaccgcttgtttcgtaccagtcgtcatactcgccctgcaaaaattcttccgcgataaacggcgcttcaaacgtgaccgctttcggtacgttgatcgacttcaggtattcattgactctgttaaattcggcttctgccgtttccctctctttgatgagcgtcacgccgatggagctcgccagatatgtaggcttcagaatgagcggcgttccgatttcctgaagcgcggcgcggaaatcttccagcgtcgtcacccgtttgtttttgatagacttgacgccggcccggttgaaggcggctctcattttgtttttatctctggcattttcagcggcctgtacgcccgctccccgcaggccgagacgttcacacgcttttgccatcggagcgataaacagttcattgttggtcgtaatggcgtcaaccgcgaacatgccggccaccttgacgatttcttcgactacttcttcctcaggtttgtcatgatcttcatgagcccagtaaatcgaatcgggatgctcaaaatcagccagactcttaaaatagtctttatcttttatgaccgcgaccgagtatttttcaattaatgccgcatgagaggctgtaattgcaaaaggtctcggaataaagctgacgaggttgtatttttcggctgcgcttttgtaaaacatatgcggcgggcatcccccaaggtcagcgataaccaatactgtttttctctccatatgtaaacactccttctctattgtgcggtgtatccaccgtctgcggtgatcgcgcttccggtcatatagcttgataaatccgacgcgagaaacagcatgacgttcgctatttcttcaggcttgccgagtctcagcagcggattgactttcgctttttcttttttgatttcttcaagcgtgccttcgttgttttcaaggaacgacttttcattcaaaggtgtatcaatgattcccgggcacacgcaattgacgcggatgttgtgtttggcgtaatcgacggccatcgaacgcgtcagctgcaatacgccgcctttagaggcgttatatgcgggaatgtcgggccatgcaacgactcctccgacggagcacgtattaatgatgttgcccttgccgcttttgagcatatacttgagcgcgtgcttgctcataagaaacatgcccgtcagattgacgttgagcaccttgttccaatcgctcagctccatctcatgaatcggggcgacaatttcgatgccggcgttattgattaacacgtccaatccgccgaacttgtccgccgctgaccggatggcgttttgacatgccggctcatctgtaatatccgtctgcacaaaatgcagcctgtcattgttttctttcctgatcatcgcttctccctgcgcctcatcaatatccgcgacgaccacattcgcctgctgattcagaaacgcctgaaccgcggcataaccgatgcctgatgcgccccctgtgatgaggacggttttatccgtcaggttcatgactctttcgcctctaattttttcgcttttgctctgttatagcgcggagggaaaaagatattgactgattttgaatctttttcaaatctgttgatggcgccgtgatcttctctcggatcgcagaaataagctgtgccgaatgtcatatccactttgcagccttcaatggtcatatcatagccgccgccgatgcagatgccgatctgttcattgcggtgtttatggaacggcatttctcccccgttgcccggaatgttggcaagcatgatttccacccagtcttccacgaagaacgtgacttccatcccaggcaataagtctcttgttttaaaaatattcaaaaaataatcttcagggcttgtgtaggtttcaccggctttcaggcgtttaatatcaatggcgatcacttcttgatccgtctcatttcttgcgccgtgaggcacattaggaggcgcgatataggctgattccagcgctgtcatctttcttgtgacatctccgacagtcatggacagctccccggaaacgacaaggccgatttggacttccttatgctgatgcggttccacgtttgtatgcggcggaacgtaagaaagcagaacttccgtatctcctctgacggacgaatattgtcttactccgttatcccattctattaatttaggcgtcgggaaataaagttcctgcaaatcttgttcagttttcatcatgaatctctccttttccaaataatgaccagctcatgggaatgcttttaaatgttttgacaaagtgaaggccgtacttttgtctggccagctcatttgtcagtgcgatgtcggacaaaccgtccttcactcttttcgcggctgcgctcgttgagttcaccagatcaaacgtgacatctttacgggtaaaatacttaatcaaattgataggagacgggtgggatacgatgacagtctgatcaagcatgtcatccgtatattcaaaaccgggccggacagccaggccgtacatcggggtgtcgcacctgaaaatttgcagaagctgcagatccggtctcatgtagaagtgcttaatgccgtcatacgcgtgaggcacaattgtgtattccagcggactttgaagcgttttttcaatgcacgattcaaatgtatcatgcagtgataatttgctgttcaccccttggagaagggtaaaattggtgatgaagttttttgctgcgtactcactgcttgtcccttcaggaccgagcgtgttgatcgtaatcagtttagatattgaataagccttgcttttcgtttgaatgctattatccaatataatcatgagcaccaaccaatctgttaaattttaagtaaatattatccatagacgttcaagctgtcaatattatttgaaaatattgataattattcctatatattaaaaaacaccttaagatataaggtgttaaaaattaacatttgcaaaattatagaaactttattttaccgatacaatgattggtcggcctgatgctcatatttcccataccttctgtatgcgaaaacgctgaggacaaagccgatgagggtgacggccgcacaaataaatccgacagctgcatatccgtatccgacatagaccggacccatgacagcagaacccaaggtgacggccaaattggacgccaggctgtaaaatgccatgattttgccccggcggctctgtgagcaatcacttaaaatggtgctgagcaaggtcaccgtcaggctttgcatcaatccccagacgaataacccgatgaccaaaaacggcattgatgacggcgcataggcgagacaggaaagccatatgctgatcacggccaatgccaccatcaaagagcgcattttccccgccttatctgcgatttttccggtgaacacgctcatggaaaaaccgattccgtacaccatgatcagcagccctgaagctgtattcccccccggcagcacgcggtgaagatatgtgccgagaaaggaatacatgccgtaaaaaccgatcatgttgcaaaaagtgatcgtgaggtatacagggacacggggcaccttcagcgcatcccggaaagtgcctgcctgccgtccgttttcctcttctgttttatccccatccgccgtgctgcggcgcgcctcaatgaaaatgagcgaagcaacgaggacagacatgagggcgaaaatccaaaacgtccaccgccaatttaaaacgccgccgataaaagagccgatcggaacgccgaaaatcaaagcgagcgaccagcttgacacgatcagacccatcaccttgccgcggtacgcataaggcacacggtcgccgaccaccgcataagctgtcggcacaaacgcacccgccgcaagcccggaaagcgccctgcccagaaagaagaaaaagagattgtgcgccagcgcgcagatcaccgtgccggccgtaaatataaggagccccgtcatcaggctgagttcccgggaatatttatctcccagcggaacgagaagcggcgcgccgataaaaatcatcaatccgtaaatactgatggaaagcgccagcacactgacatccgagctgaaagcccgcgctaaatccggaagcagcggagaaatcaccagctcttcagaaccggcggcaaatacgcctaatgtcaaagcaagcgcgagacagatcggaaatcggcgtttcgtttcgatgtgatcggtttgtttgctgttcatgctctttgaacacctcttccgtaaaacttttctaccttttgttgttttatagtttagcatccttatatttcattttacatttcacatgaaaactaattccaattttttatttacattcagattttaaataaaatatttagtttgtattcaataaatgatataaaatacgccgtccggttatgctatagtgatagaatcatttgttaaggtgggggtcatggaatgaataacgctgattcaaaggccgcccgcgcaggcctcggcatggtactgattctcgggacgctcgcttcattcgggccgctttcgctcgatatgtatctgcccgctttgcctgaagtggcggccgatcttcatacgacagcgtcacttgcgcagctgagcctgacgttttgtcttttggggctggcggtcgggcagatcgttgtcgggccgttcagtgatatgatcgggcgccggaagccgctcattctgtcattgctgctttatacgctgtcttctttattatgcgccttcagcccttctgtttcgtttttaattgtcatgaggtttattcaaggattcaccggggcggccggaatcgtcatcgcacgggcgtccgcacgcgatatgtattccggaaaagaattgacggcttttttctcattactgatgctcgtcaatggggcggcaccgattttagcgccgattacagggggatttatccttcagtttgccggctggaaaatcgtatttgtcgtgctggcggtgatcggctgtatcattactgccgccgtgcttacggcgttgcctgaatcactcccgccggaaaagcggacaagcggcggactccgggagacgctgatgacgtttcggggcctgcttggcgaccggatgtttatgggatttgcgctcagccaggcatttgtgatgaccggcatgttcgcatatattgccgggtcgccgtttgtactgcaaaacatctacggcgtatcggcgcaaatgttcagcctgctgttcgccgtaaacggtgcgggaatcatatgcgccacccaaatcaccggacggatggccaaaacacatgatgaacggaagctgtttgtctccgggctgttgatcgccgtcatcggaagcatcgctttgcttttatcacttgcgtttggtttaggcctgacggcggtctgaatttctttattcatcattgtttcttctgtcgggatcgtcacgacgacgggattttctctggctatgcagaaacaggagaaaggcgcgggaagcgctgcggctcttctcggactcctgccctttatcggcggtgcggctgccgctccccttgtcgggattgccggagaagaaaatgcctggccgatggccgtcagcattttcggttttgagttctttgccgttctatcctatgtgctgtcggccaaacgaaaaacaaagtaaagcccgccgctttttgcggagggctttttttcttatccggcagcgccttttttcgaagaagccggctcacgattcaggcgttttttaataccgaagtgataatacgcgtaacagatgatcatcagcgggacgccgcagtacagaccgatacgctggtcggggataaagatgagactgattaagataagaccgtaaaccgaaaatccgagaatcggcacgatcggataaagaggcgttttaaatgccaggtctttcagatttcctccttcagcgagaaagcgtctccggaaaacgaattgtgaagcgcagattgacatccacgcgacgacggtaatcataccggagatggaaatgagccacacatacaccgtttcagccgcgaatacacttgtcagcagggataaaccggagatagcgatggtgatggaaagagctttcagaggcacgccttttttcgtcagtttcgttaaggaagcgggacccatcttagtttttgatagggaccacatcattctggacgaagcgtacagcccggaattcgccaccgacagcatggcggtcaggatgacaaagttcatgatatcagccgcatagggaacgccgattttatccagcacagccacaaacgggctttcgatgacgcctgccgtttggtacggcaaaatggacacgagaacaaacatcgccagcacgaagaaaaacagcgtccgccatatgacgtttcggattgagcggggaagcgtcttttccggattttcgctttctcccgaggcgattccgaccagctcggtgccctggaatgaaaaattcaccatgacaagggtaaacagcacggcttgggcaccgttcgggaaaagccctttgtccgtcgtaaagtttgacagatacggagccgtctgcccgccgttaaaaccgacaaagccgaataccgcagcgcagccgagaataataaacaatacaatggccatgaccttaatgctggaaaaccaaaattccatttccgcaaaactccgcgcagacagcgcgttaatggaaaaaatgacgacgccgaatacaaggcaccacacccaaatcggaacggccggaaaccaccgctgcattaaaatccccgccgacgtcagttcaagccccactgtattggcccagctgaatgcgtacatccatccgatcgtaaaacccgtcgacggcccgagaaactttgccgcatacgcctgaaatgatcctgcgaccggcatggcgaccgcgagctcccccaaacaaagcatcaccaaatacattaaaaatccgccgatcacataagccaatatcgcgccgatcggtcccgcttcactgatcgtaaaaccggagcccagaaaaagccccgtcccgatcacgccgccgagggcgatcataaacaaatgccggcccttcatcgtgcgctgcaattcagtttgattggtatctccctgcatatacatcccccttattctgttatgtcagccatttgtgcgtatgtctaatcggcagctgtgcaaaaggtgcattgttgtctgttgaatgagttccggcagcacatggaatgtgtacggcttgtacacgcgttccgtccatttatggccgtcctttccgtatacccctatattgaccgacggaatattcaattccctgatttctttaaaaggaatcgtcccgatgacatcccagcccggaaaattatcggtaaaggcggagacctcctcgtctgtttcatgcagcgataaaaagcttccgtccgctaaataagggaaaaactttttaaaggcgaatgtttctccggttgacgccgctgttttatcgaccgcttcttgaatgacatgctgcaaaagccggtcccgtgtgctctcttctttcagataattgtgcggaaggtaaggcggcgcatagaaaataatgaccttggctccctgctcaggatcgagtttttgcagttcctcgacggctttaaagcatctcatccgcagttcaagatgttcatatgttttaaatgcctgcccgatacactgtgcagggtctatcccgcggcttctcagccttttcaggtaatcttccagactgtacacttgaacgttccatgacatctcttttttcggcaggctcgttctctcacagtattcgtcgtaataatcagataattttcgttctgtctctttgcaggcttcgtcagccacggcggtcagctgatccatgacttctttggcggttttctcgtaaataaaataattaaaatagacatagctgctgacggcggtctgcacgttatacgcttccttgttgtcacgctggtagaggcaggtcggcggaagcacaagctccccttcaatgttttccgccatatgaatattgttgtgaattcttctggtgatttctgacgcgatcaaattcgggtcgatgccggacagcgtatcaccgacatgcacctcccgcccgtaaatcgcaaagcaaggcaaaagcttccctgccgcgcccgtgtagatgtaccttgtcgtgtcaccctcatacagcggggtgataaaatcgttattaatcgctgctaaataacgaagctgcttttcttgtttcagccgttttaattcagaaatgctggttaaaatgccggaatgctgactttcttcatccgggtttgccatgaacagaatatggcccggcagctgatcacgccgttcagaaaagtgaagcagattggcgagatgaacggcaataccgctctgcatatcaaccgaaccccttccgaacatccactcgcctgagcgggcgtcccgctgcacatcccgatcaaattcatagtttgagaaatactccgcgagacggtcggaatcaaaagcgatatcttttaaagggccgaaatcctcgatgccgaccgtatcaagatgagcgtgataaatgaccgtattcaggctttcgccgtttccctcaataaatgcgaaaatatttttgcggccgtaagggtcctcaggaatcgcctgctcccacacatgtgacggattctcctgaaagtagggaaagctcttgatcatatctttgatatagtcggctttttttccttctcccaatgtgccgttgatgctgtttaacgccaccagtgattttgtaatggcttctattttctcctccggaagcattttgctgagctgctgatacatgttccatcctccttaccctcatatagagaaaatagcgcgactctctttttcatcgcgctatttccgaaagattaataggcttcagacgttgtttttgcctgcatatgaagaatcagatagtcaggtcctccggcttttgaatcggttcctgacatattgaagccgccgaacggctggtatccgacaatcgctcccgtacatccgcggttgaagtatagattcccgacgtgaaaatcttcgcgggcgcgttcaatgtgcgcgcgggttttcgataacagagcgcccgtcagtccgtaatcggtattattggcaatctcaagcatatggtcgaaatcacgggcttttgagatcgcgacgaccggcccgaaaatttcctcctgcatcaggcgggcgttttcatcaacatccgcaaaaatggtcggctgaataaagtatccttttgaatcatcaccttcgcctcccgtcaggagttttccttctgttttgccgatttcgatataactcatgactttattataagatgcttcgtggatgactggccccatgtatgtatcaaaatcttccggacttccgacggtgagtgattttgttaaagcgacggctttttcaacaacttcatcatagacgtcctgatggatgaccgcacgggaaccggctgaacatttttggcctgagaatccgaaggcggaatacacgattgaggaagcggcaagatcaagatcagcatctctgtctacaagcaccgtatctttccctcccatttcggcaatgacccgtttcagccacttttggcccggctgtacttttgcggcgcgttcataaatacggcatccaaccgcgcgggaacctgtaaacgacacaaatctcgtcttcggatgctcaaccagatagtcgccgatttctcctccgtcgcccggtatgaattggagcacgccgtccggcaggcccgcttctttcatcacttcaacgaatttcgccgccacgacaggcgccgcatccgccggtttcagcagtatcgtgttgcctgttacgatggctgccgccgccgttcccgccatgatcgcaagcgggaagttgaatggagaaatgacgattcccaccccaagcggctcatagtgatactgattatattctccgtcacggctctttacaggagaaccgtctttcagtttcagcatctgacgggcgtaatactctaaaaagtcgatcgcttccgccgtatccgcatccgcttccttccacggttttcccgcttctttcactagatacgcggagaattcgtgctttcttctgcggatgatcgccgccgctttaaacagcacattcgcgcggtgttccggccgtacttttttccatgtttgaaatgcctgcagcgcagcctgcatggccttttccgcaagttcttttccggcggccgctacagaaccgatcacttcttttttatctgccggattgacggaaatgatctttttatccgtttcaatcgcttcaccgttgataataagcggataatgcttgccgagctgtgaattcacataagccagcgcttcctgaaacgattgtttatttgtctcttcctgaaaatttgtaaatggttcgtgtgcgtatgaaactgtcattagaattcctccccgtattttgtaatgtgtgctcacgctttatgatgatgcaagaagcataccagcatagcaatttgtgataaaaataagaaaatctttgccgaaagcggacgaagcttgtccgaatctgtcagctgtaatctgaaaacgcaaagaaattttgcgatccgctatataactgatgcaaaatctctttgcggataacacttatacccagccgcggaaccgggccgcttcagccgactttctgatgcccgtcatataggcggctaaacgcatatcgactttgtgggtatgcgctgtctgataaatggattcaaacgaattcaccatgacgctgcgcagttttccggcgacttcctcctcagaccagtaaaagccttgattattttgcacccattcaaaataagacaccgtcacgccgccggcgcttgccaaaatatccggcacgagaagcacgcctctttcattcagaattttcgtggcatctatcgttgtcgggccgtttgccgcctccacaatgattgaggctttaatgtgatgggcgttttcagccgtaatctgattggagattgcggcgggcacgagaatatcacagtccttttccagcagctccctgttcgttatgacatccgagaagagattcgtcaccgtgccgaagctgtcccgcttatccagcaggtaatcaatgtcaaggccgtcagggtcatacaaagcgccgtgggcgtctgagatgccgatcaccttggcaccggcgtcatgcataaatttagcgagaaagctccccgcatttccgaacccctgaatgatgatccgcgcattttccaatggaatcccttttttcttaacggcttcctcaatacaaatcgtgacgccttgcgcggtcgccgtctcccgcccctgtgaaccgccgagaacgatcggtttgcccgtaatgaatcccggtgaatcaaattctctcaggcggctgtattcgtccatcatccatgccataatctgcgagttggtatatacgtcgggagccggaatatcctttgtcggaccgacgatctggctgatcgcacgcacatatccgcggctcagccgttccagctctccgaatgacatcgtccgcggatcacagatgatgccgccttttccgcccccgtaaggaagatttgtgatgccgcattttaaagtcatccagatggaaagcgccttaacctcttcttcactgacttccggatgaaaccgcacgcccccttttgtcgggccgactgcgtcattatgctgtgagcggtagcccgtgaaaacctgtactgagccattgtccattttgacagggatgcggacggttaaaagccgcatcggctctttcatcagttcatacatattgtcaggatagcccagtttgcgcagggcttcttttatgatcgattgtgttgacaagaacaaattaagaacttctttttcttcatctttctgattgcttttagaaagcgggttggctgacatgttttatcacctcatcgtattttacgtgtaagcttcaattaccggcagaacaaaatgtaagcgcttttacaccaaaacccatcaatccctttcacattgtcgttacgccctttttatatgcaagattcatgccaggttttttgcgcataaaaaaagaggctgttgtcagcctctttcatcctggattaacgcgggtcaataaccagctttgtttcggcataaagactgccggcccccaaaccgtttacgtaatcgcctttaattgtatacgcgcccgcgcgcggaaggtttttacgcaccaggacgagattgtattcagacgcgcccaataagtcaagggtaagcggaagtctgaccgtttttccgtagttgagaatttgcgtttctttcagtgttcttccgtttacagagtccctcacagtggcgttgaacccgtcaggaaattgaaattcaacggcgccgacggcaagcagcgcattcggcttgtatgtgacttcaatatcagacgtcgcgtattctttcgtactattgacggttttcgcttcaataacggcagattgggcgttcgcatgaaaagatggcaagaacacagatgaaaataccgcagcactgatgagaaaggccgaaaatgattttctttttaacatcatgaattcctccagatcatatgggattcagagcgtcctctgccggaaaagcgtgtctgatgattccattcgcgaattgggtttctcttttcctgagaataatctaccacctttatccatggaagtaaattattttttggaatattctatcatttatttttcacgagatgaatcagcacaaaaaacgaagacatccgctgtcttcgtcttgtgcgctatcggtgagccgtctgccagtcaaatccgatggtgtcatcattccacgggattcttttttcgtcaggctgatccggattgtaggacattgtcgtgaaataaataatggtcagcggggtttcacccagcactctgtacccgtgtgcgacgcctttgggaatgagaaggagcatcggattgtcttctcccatgtagtagacatccgtttctcccttggttgcagactcttcgcgaaggtcatgcagcacgacctgggcgtggcccgtcggaaaaaaccataggtcatcctgtttctcatgatagtgaaacgctttaatgacgccgggatagcttttggaccaggaagcctgcccgaaacgctctaagagatgttcatcgtcacggacgagttctgagaaaaaaccccggtcatcgctgtgtttgatcagctttttgatttttacgccttcgatcacttgcactgtccctccctttgtaaataatcatgcagcgcttcccgccaatgcctcatgccgagcccctgccgttcaatcgactcaagactcaacaccgagtaagcggggcgcggcgtctcatttccgtattcctccgtcgtgacgggcaacacggcggcggttctgccgctttcttcaaaaatagccttggcaaattcataccagctgcacactccgctgtttgcggcgtggtataagcccggcggcctgtcaaacagaccgatcaccgtttcggctaaatcttttgtgtacgtcggcgccccgacttgatcgttaacgacacgcacctgatcatgtgtatccgcaagtttcagcatcgtattgacaaagttgtgcccgccgctgccgtacacccacgatgttctgataatggtgtggtttttccccgttaaccggatcagttcttcgccgagttttttgctttttccgtaaatcgtgcccggatctgcgggatcatcggtctggtatggccgtgttcctttgccgctgaagacgtaatcggtgctgatgtgaatgaatttcgcgccggtgttttcagcctcaagcgcggcataataagcgccgattccgtttattaaatacgctttgtcgagctccgtttcacatttgtcaacggaggtgtatgccgccgtattgacgacgatatccggcttgtaatggctgaacgagtgccgcaccgaacgctggtcagatatgttcatcatcgcttttgtcaaggcgatcacttcatacccttcctgcttcagctggcggcataactcccgccccagctggccggccgctccggttactaataccttcgtcaatcggatccccttctttccgattagtcttggctgtctgtataccagcgaatggttcttctcattccttcttcaaatgtgacgtcctgctgccatcccagctcatttttcagctttgaagcattgatggcgtaacggcggtcatgcccttttctgtcttcgacatgagcaaactgttcctcgacaccgagctccttcatgataaatgacgcaagctctttattcgtccgttcatttcctccgccgatattgtaaatgtcaccgagtgttcctttttccagcacgagcttaatggcgcggcaatgatcttcggcaaacagccagtctctgatctgcatcccgtcgccgtacagcggaaccggcgtgccgtttacggcatgcctgataatggtcggaatcattttctcgtgatgctggtacggcccgtaattgttgctgcatctcgtaatgatggctggaagcttatgggttctcacataagacatgacgagcaggtctgagcttgccttgctggccgaatacgggttgttcggagaaagcggcgtcgtctccgtaaaagcgggatcatccggcgccaaatctccgtacacctcatctgtggaaatgtgaatcagcctgccggcttttccctgtaacaccgcgtccgccagtcggtatgtgcccatcacatttgttgtgatgaacggctctgcctgatttatgcttctgtccacatgggattcagccgcaaaatgaatgacagcgtcatacatttgggaaaagactttgtcaatgtcctctttttcagaaatgtcacctttgataaaacggaaacggccgttcttttttaaggcttctatttcaagcggcctgcttgcatacgtgagattatccaggacggtaatctgcgcgtccgtttctttcagcatcatctttgtaaaggtaaggccgataaatccggcgccccctgtaattaaatatgattttggcatgattaatgctcctgtcctttctgtaatgcctgatgcgccaggcttccggcgaggtagagcgattcatgcgtgcccgcatccacccaccagcccgttaacacatcatacgtcagctcactgtgttcaatgtataaattattgacatccgtaatttccagttcgccgcgttttgaaggggaaatttgttcaatataggaaaacacttctgcgtcgtacatgtagatccctgtgacgcatagtctggtcggcggctgctccggcttttcaatgatcgacttgatccgtttgtttttctcatcaatctcggcgatgccgaagcgctccggatcgtccacttctttcagcagcactttcgctccttttccctgctttgcgaaacgctccgtataaggttttaatgaatcttcaaaaatattatctcccaaaagcagaacgaacggatcgcgcccggtaaaccgctttgcgtatgataaaccgtcggatatgccggaggcggctggctgaacctgatatgtgattgagacgccgagctcttctccggtttcgagaagtttatgaaattgaggaatatattctttttgcgtaatcagcaagatatctgtaatccccgcttcttccagcttcatgatcgaccagtaaatcatcggatatggaccgacagggagtaaatgcttattgaccgcttttgtcagcggcataaggcgtgagccggtgcctccggctaagataacacctttcacatgaacacttccttacgtgtggttttatcacaaatcataaagaatcgccgccgcccgtttgatgcccctgccgtcaaccagcggctttccgttttgatgaagtccggtccgcatcggataatcagcggccatgtcagacatatgccgtgcgagaacgtccgctgatatgcattcaccaaggccgagatgaacggcggccccccgtgcggcgaatttttccgccgtctcagtttgatgctccacttgagaaagtacgatgcagggcacacctgtacaaatggtttcatataaagtgatcccgccggacacgacggccatatcagccctcgaaagaagcgcggccatgtcatttgtctgccttaccatctcggcataaggcatttgtgtaagatgcgcgcgcacgttatcagcatgaggcgcggcgccgcccatgacgatgatcactcgttttcgctgaatgtcggggatgcggcggcatgcttccatcactttaaagacaagcttcttcgggtcgcttcctcctaatgagaccaatatggtccggcattcttttctcagctgataaagctgtttggctttttcaaaacccggatgaagaatcatatactccgggccttcatatacagcggcgctgcccatttggaccgtccggcttttcagcccgccgtaaatgccgtttataacgacatcgcataaatgaatgacatgttcccgtttttcttcaaataagatgatgcgtgccgatgaatgctttttgacttcctctaaccagtcacacggcatatcgagcagatcgaatatgagaaggtcaggagcctgcctgtttatttcccggacaataaattccttctgtcccttgtcaggcttgatgatcacttcccattgatcagatgacagataagaagaagcctctttatttgtgtagaacgttattgagcaattgttcttaatggcaccggcaagcagcttcatccggaccgcgtgccccatgccgatgtcacggcccccgtcagcgaaaatcagaacccgcatgctaatcagcctctttttgccggatcatttgattaatggccctgagctccggatcacgattcagcagatggatcaattcttttgccggaatatcaggacgcgagcccgcttttacgtacagctcgcgggccagcctgtagtcctcttctgtatcgacggtcatccgcaagtgaggagcccggagttcctgcgggggctcaggaaagagaagccggtacctctcaggagattctcttattaaaagcgtgacatgttcctggtatttgtccgccagcgttttgtcggcattgatctccgttaaaagtcgcgcgcttaccgcctcgccgccgatgccgagcggtgtaccgcagatatacgtgtagtccgcgtgctgatctaaatgcgattgaatcagaaaatcaagcagcgaagggtcgacaaacgggttatcccccgtcagtctgactgcgatgtccggttttactcgttcgatgacttgtgcaaaccggtcaagcacgcgctgctcgctgccgcggtgcacacggtagttcttgctgaggcagtgcgcagacagaatgtcgtcggtcttgctgtcagacgcggcgacgatcagattatcccgcgattgatcataatacgcgctttgccgaacccttttgacaatcatatcgagaatcgtatacccgccgatcggtttcagcactttgccgggaagacgcccgcttcccatccgcgcctgaatgataaacaaaatgtcagtcatcatatgggctgcctttcgtcaaaaggtcatcccaagtgatgcccgtgtcggcggggatatccctgaccgcacgcgcgccgtcagttaaaagctcaaaatatctcgggtgaagcccctgcggtttttggccgggacgaaggacggcaaggttttccgccgtaaaacattcgcctttttgaatcggcgctgttgaaaaaatgcctctgtaagcgaaccttctgatatccccttcaatcggtgtcgtggttttatgggagcttcccgacagcacttccggcaccgaagcgtgatgcccctgccgcagctccgcttcaactgagcggatcgccgcaaccatttgttttaattcatccggattgagggcgaaggagtgatcagcaccgggcaggtttttatcgatcgtaaaatgcttttcaatcagtttcgctccgagcctgaccgccgcgcacggcacatcatacggatgggcgctgtgatcggagaaaccgatcactgcatccgggaatgcggcggcaagcatgggaatgacgctcagattgctgtattcaggcggcgcgggatatttcgctacacaatgcatgatcgcaatttctttgttcccctcgccggtaatggtttgataagcctcctgaatatctgaaatatcagcgcccgcggtggaaaaaataatcggggtcttcagccccgcgacatatttcaataacggcagatggttcagctcgtaggaggcgattttaaaggctgaaggcgaagtcgcatacagtaagtcggcagagccttcgtcacagaccgtgcttaaaaaaagcacgccttttttcttacaatattcaagcagcggttcgatccactcagcgggcatttccattgattgcactaaagaaaatatcgagacgtcttttcccgcagcggttttgtacaagccggggtctttctgatacattttgtcagcctgaaacatttggaacttgaccgcgtccgcgccggcctcactggccgcatctatcaattcaaacgcctggctcagttttccgtcatgattaattccggcttcggcgatgatgaatacgggcgaaccttcgccgattgacttcgttccgatttggcatgatgccatcagtccgcctccttcccgggccacacatgatagtagtaataggacgcatccgctttaaatcccattctttcatacaggcggatggctcttacattgtggagctgcgttcccgctgatacagtcttatgctgaaagcgcaatgattgttcaataatgtgcgccgctaaatggaatcccgctcctttcccttcaaagcccggctttaccgccatcagatcaaggacgaattcatcgcctttagacagcccctgaataaagcccacggtctctcccttatatgtggcggcgaattgtaacgaagctctgccttccgcgttattccgcgcccactcttcaaacaggcggtttgcactttcatagctgaggcggggatcttggtaatacctgctttttgtaaaggcgtcgcgggccagccggctgatcgcttccgtgtcgccgggtccggcttctgtaatctcaaacggcggtgtgctgttatatacacgcacaggactgacgagcttgagcagactccctacaaaataagcgttcggaagctgctgaacgacctgcatcgcgccgatatcttcagccggtattttaataaatataaaatcagtgcctgccgcccgccttgccgcgtaaaattcctgaaacagccttttaagctgaccggcgctgtttgcggctgcaagcttcacattgatgatattttttcggaacaattgactttcccacgaagagttttcatataaaattacgccttgaaggctgttttcttccaataaacagagcgacgattcataggcttccggctgaatgcccttctgatgcaggaaggtatgaatcatgtcctgcgcaagattttccctcagtctgtacacctaatcagcccctttgacgatatccgtaacggctgcaatgacgtattcaacgtcgtcatctgtcattgacggataaagagggagtgacacggtgcggtgataatacgctgcagcggccggaaagtcagtctccttatacccgtacgttttttgataatacggatggaacggaaccggaataaaatgaacacttgtgccgatattatattggtcttttaaagcggaaatcagatcgttccggctgaccccggcctcctgctcctctatttgaagaacatacagatgccatgcatgccgcccgtcatcactgacatgcgggatggtcagccctttcatgtgtctgaaggcgtcctggtagcggctcgcaatgtcggctcttctttgctgcatgctgtcaatccgtttcagctgatgaagcccaagcgctgcctgaagatcaaacatattcattttatagccgggcgtttcgacctcgtagtaccagcttccgtttgaagaatagcggttccacgcgcctttgctcatgccgtgaaggctgagcaccctgatctgatcggcgagcccgtcatcgtccgtcgtcagcatgccgccttcaccggttgccaggttttttgtcgcgtagaagctgaatgccgtcgcatcgccgattgatccgatcattttctgtttatacgtggtatacacggcatgtgcggcatcctctaagacaaataactgatgcttttcggcaatggccagaatctgatccatatcacacgactggccggcgaaatgaacgggtacaatcgcttttgtccgcggggtgacggccgcctcaatttttttagggtccgcattcagcgaaagcggatcgatgtcaacaaacaccggaacggcgcctgtgtgcacgattgtattggccgttgaactgaacgtcacggcagacgtgatgacctcgtcgccgggaccgatccctttcgctttcagggccaaaaacaaagcggcggtacatgagttcagcgcgatcgcgtgctttgcccccgtccaggcggcaaaggctttttcaaacgcctctactttcggtccctttgaaagccagcccgattcaagcgtatcaataacctcctgaatttcgtccttcccgatcatgggcaatgaatagggaagaaaagctgatcttttttgcaccattttctttgcgctcctatcttttttatgaagggtcaacccgtctgaagctgactccggttttttcctgaagcacttggcataaagcggcaagcgaatcctgaaccgggtagttcgcggcgacaaaagcacggcgcgcctgttccgctttttgatattctgcggggctttcgcatatccggattaattcctgagcaagtgcctgcgggtcctcaaaaacaaattctccaagtgaatgataataagggtatcggcgggttcccgctgattttccgatcagcacgggcttttgaaacagcatcgcttcaagaccgaccgttgatgtctgtgtcaccgcagcgtcaacataagggagaatatcatacagctccatctcttttttgatgatttttcctgctttatatttccgcagcacctgattgtaaacatccagcttgtttttgccgatttcccacggatgcggtttaataatgagctgcatgttcttttggccggcaagctcttcaagcacgcccgtataaaattcatcagaaaacggctgcgtggcgatcagcaccgtccgctttgacgggagaaaagaaagtttgcggtaaaacgtgtcctgatctatcggctctcttgagaaaatctcgtcgaaacggggatgccccgtaatgatgatttgttcatccctgcagccttttgctttataccactccgcttcataagccccgaatacggcctgatagtccgtaaatacgggcagaaacgcttcatctcccatgagcgctccgtgctgcagacagatgctgacggcgttttttttcgcggacatcagcgccagcacacggctgtaaatatcctccgtcgtgccgactacaacggcggaaatcttctcggccgtaaacaaaatatcaacggcgtcaatcgcttcaataaataatggaatgtctttatacaaacgttcctgaaattctctgtttccgaaagcgggatggctgtgaagctctttcaaaatggaatgggctttttcaatataagggacgggattccctttttgctccattcccgtcagctccaatttgcagataacgggcagcccgtaatggtcaggcagactccatctggccagtaccgctgtttttgccggatcaaactgccggtagtttccctcggtgaaccgaagatgatcgaaatgcagaatgacttttccgtttaccggtttctcatctgttttcttaatgttttgccttttttgatcataatatggctgtataccggcttcagaaatatgctgatcagccggtccgaaaagctctgggttctgctccatgctctcccgaagcgccggactgatatattgataaaaattactgatcaatgcgagcgggatgtctttgtagcgaagtgactgaaaaaggtcaatatactgccggtacagcacccaataattcgctaagtatgccgacaagccctcacccctttccaagcttttttaatgattccctcagctcccggcacgtggtctgttgcggaaggctgtttacaaactcgtttttctccgccgcgaaaagctgataatggatggattgatcggtaatataattgatatcaagctcctcagaaatcgggtaaaacggataaaaatgattcactctccagaagaaacgggcgtcaccgatccggtaaaacgcggggctttcatcccaataggaaccgaatgccgatttgacctgttccagcacggaaaaccggtgcatgaccgaacaatggtcaatggcgcacggcgcgttccacacgatccgttcggcgggcctggccgtctccttcaccgtctctttccgctgattcagatgataggttttggaacttgaatacacgacggctttttccggatcttcatcaagctctttcaccattttctcaagccgttccggcacatacgtgttgtcgtcggtcgcatacgtcacgtactcgccctccgccatttctattgcctgattaatcaaggcggcgtagcgtgttttttccgttctttctttgacgcccgatacatcgctttgataaaaccggacgcggtcatccgtgagaaaaggacgtatttccgccaatgtcgcttcatttgagttgtcatccataatgaacagctcaaagtccgtaaacgtctgagacagaatacttttaatagagcgggccacatagtcacttttgttatagctcgtcatgatcactgacactttaggcaactcgtcacccccttttcgcacctgaaactaccgctatcatatgttccttatgcggaagatgcgctaggaatacagactattatgtgaaaagtcagcattgcgcacacaaaaaaagccggctctgatgtccggacttattggagcgtattttcttttttcgcataaatctttctttgggctcatatggtggaatagataaaaacagcagccgctctgtcggctgtctgatacttgtcaggaggtttcagcatcaagaggttttcatcaaaggaggaacaatatgaaaccgaaaaagaatcaatatcagcaaatgcaagggatggggatgggaatggatatgcaaggataccagccgcagctcgggcctaatccttatccgcagcctcagggccaaggatcacaaatgatgccgatgcagcagcaaatgacaatgccgatgcagcaaggccagcagagcttcggcggggggttccccggccagccgcagcagcagggcggcggcagctttcagattccgtcaggtccatcatcgtcacaaaacgttcccggcatgctgccgattgaagagtcatacattgaaaatattctgcggttgaaccggggcaaaacggcgacgatttatatgacatttgaaaacagcaaagaatggaattcaaagattttccgcggtgtgattcaggcggcgggacgtgaccatatcatcatcagcgatccgaaaacgggcacccgctatctgcttctgaccatttaccttgattacatcacgtttgatgaggaaatcgcttatacttatccgtactccatgtcttcttattctccgagataaatcaaaaagccaatcgctcacttgacagaggattggctttttttctttataaatatttgacggccgcgacgataatcataatccaagagatgataaacgccacgccgccgagcggtgtaatcgcgcctagaatggaaatctgcgtcacgctcaatacgtacaggcttcctgaaaacagaacgatgcccgcaaacatcagccagcccgcaacagaaacactgcctgcgccagaaagcttttcggccaaaaacgcgacagccagaagaccgagcgcgtgatacatatgatattgcacacctgtgtgccacacctgtaaatatttatcggggattttcccttcaagcccatgcgcgccgaaagcgcccagcgccacggccaataaagcgttaatcgcaccaagaataataaacactttcatctatttttctcccgccttttcgttaaagtttccaattcaatcataacccaacatcggcaaaattcaacgtccgtcatccgatgacacgagattgtcggattttttctttttgataagctggattcggtcaatcgctatcgccagcagcgtcccgagcacaaggccgttgcttaagagcgaaatcaggatcgggtgcatccctgataacgcgctctccggcacaaacattacgccgacccccgtcaggagcgccagaccgataatggagcggattcgtttttgctccgctttctcataagagtcaaactccgtaaaggcaagacccgccatcgtggaaaaaacgacgaagtttaccgcaaagccgaccggtgagggcagactcgcaaacgcattcataaatagcgggatcatactgatgatcatgacaaatacacttcccaaaagaaacggctttttcgaaggaagcttcgtcgtctcaataaaaccggccgcccctgaaatcggcacaggcgcaatgccccctgacagtccgctcaaaaggtggctgatcgaagccgcaaaccctgccggacgctcacgccgcttcccgacggtgccgccgaattttttcaccgccgcttctacaacccggatgctcgcgagcatgttgacaatcaaaagcacggtaatgaagagtgacgtaatgatcaggccgctgtcaaacacgggttttccaaacggaaaaagagacggcagctgaatcacgcggtccggtatttgaatcggtttggcagcgccgaagacggcgaataagatccatccgccggcaagcgaaaggagaatcgcatactgtcttaagaacgtaacattcgatcgggacatgatgaacatcgccgccgtcacaaccatggcgagcccgaatacaaggccgtcgacgctgttttttaaatagccgatgcccaaaaggcctttcacaatcggctgactcagctgcatgaccaacagcagcagatacacaccggtcacaaccggcgtaaacagcacggccagccgttcaatcactttaaaaaggctgaacaaaaagaaaaagacagcgcttaataacagcgccccctgcagcgcccgcagcgtctcgccgaatgtcgcgaacaccgtgccagtcagtccgccgtaaatcgtgtatacgccccaccataagcctgccgggctttcattaatcggcagacgatgtccctggagacattggatgaccgcggcgacgccaagcacaaaaaatgtgctctgaatcaatgcggcagaatcggcatggttcaagtgaaatgattgtgcgatggcgacaggaactacaatcgcagccgcaatcataaatgccgtccattgcaaacccccgagtatcagtttcaagtcaatcaacctctcctgttaaaaatcgaaaatggaatccccgtttccgtcttcctcacgttcgactttcgcttttttctgatattggttcagcccggcgctgcccatcattttttcaagcagcagcgggtctgtcgaaggagacgcggaaggtttcggcgccgctttcggaatcggattctgcacaggcgccggagcggtgtgcgtctgagtgccgagcacgacatcacacagagagcggatggcggccgcgtgcattttgacctcctcggtgcgggtcgccgttctcgcctgcctcagttcttcttccatcttctgaatcaaagcagagatatgtatgttcatgagtaaatcctccagcagtaatttgtcttcttcctgcattttatcaaatttctgagcgaatcgcagaattgagtttgttattttttctgacggcataccgcccggaacgtcaaaaaagacgcttccgccgggcggaagcgcctcaaaaaaaccgtttattgcggcaggtcggggatgcaccaatcgatcggctgctcccccattttttcaagggcggcgtttgtacgggaaaacggtctgctcccgaaaaagccgttccttgccgaaaacgggctcggatgagtcgattcaataataatgtgtttcgatgtgtcaatgcgctcttttttcatctgcgcgtgacgcccccataggataaagacaatcggcttctctctttcattcaccacatcaatgatgcggtcagtgagccgctcccatcccttgcctttgtgggaattggcctgaccgcggcgaaccgtaagcactgtgtttaacaaaagcactccctgcttcgcccagctgacgagcgatccgtggttcggtacggagcagccgatatcgtcctgaagctctatgaaaatatttttcaaagacggcggctgtctgaccccgggctgaacggaaaaactaagcccgtgcgcctgtcctggcccgtgatacgggtcctgtccgagaatgaccgcttttacatcctcatagggcgtataatgcaaggcgttaaaaatatcatggctgtcaggataaatcgtttggctgctgtattcttgtttcagcatttctctcagctcttgataatacggtttgtcaaattcatctttcagctgattccaccagctgtcttttaaaagctgtttcaaactgtccgtcccccttatgaactgtgcagtcttgaatggacgggctttccgtcccacacaatgtcagtcggcgcctcccgcctcttcatgtccggctcttcaagaagaaccgcgaagtttttcgtcgggagctccccaagcccgtgcttttcgcttaaccggtctaagtaccgcttccgtttgccgccgagatccgcggactgattgccgcctccctcaaaaaacgcatatatgacgctcgcgcaaggaacacgcttcacacggtgctgtttcgcggcgcgcaaataaaagtcccagtcccaataattatggacatccggatcaaaataccctaacgtgtcatgcagagaacgcctgtacatgctgcctgacggaacgtacgtggaaaatacccgcatatccgcataatccgccgtataggcgaacggcttccgtgacatcggatatcttgtgccgccccgttcttcaaatgacacaatttccgcgtcagaatggacaaaatccgcatcagcaagtgcggccgccattctttccaaatggcccggcgtaatgaaatcatcatcatcggacagcatgatataatcacccgacgcttttttcacacctgcgttccgcgcttccacatgtccggcattctgttctaaatcaataatctgaatcggcagatcgctgtacagctgcttcgcttgttcgaccgattccccggcatcatttacaatgatcacttcataaggctttatggtctgcatggaaatcgactccagcagctcacacaaagccggaatccggttatacgtgactatgacaattgatatattcatgacccgctccttctgctttttctcatgttctattaaaacataaagctgcggagagatcagggggaatttttgatttcggcccattcagaaacaaatccaggtcatgcccgccagcaaaacgagaatgatgagaaggtctccccaaacagtgcataccgccttggcattaagtctgcccgcctccatggcgttccaaagttttgattgataaacaggcaccaacaccatcgcatagcatgtgcacaagcagacaaaagccggcgggacaagcgcacatccatcctcatgccaatcatgaatcagttccggtatactcaccccgctgtcaatgtacaagtataatatacccgccagcggaatgagcgaactgatctgcagctcgaaaagtttcactttccactcccgtgcaaatgaaacagcccaaagccaccccagcgcataaaataagagaaggaacaaaatcccgaaaacagcaaaaaaagcgtcttgcagcgtgttcattaccataataaaaagactcacaacaggcaatacgagaagcaagctgaaaacggtaaacacggtaacggctatttgggcgcacgcgccgtatatccacgaacccagtctcatttcatcactcctatatagaaattctatgtatatagtgaaaaaaatcaggcaagtctctgcctgcctgcgtaaaaacccaattttccgcaaaacggaaaacagaccgtcacaacggcgcatactgccgcaaaactcggtgtgaccgccgaaggaaacagcccagccggaaccagattgaacaaaaagacaaacataaaacatagattcggcaccattgaagcccataccgtccgctcagcaagctttttgccgccagccccgaactctttgccagcttgatagccgatttggaaccaatacagcacataaccgatcatgatcagccatactgacacggaaatccctttccacagcgcgtcaacagcgggatgaattctccacgcgtgcatcatcgtaatcatcgcccccatcacaaaaagaccgcagttgcagaacagataaaagagcataaaagtccgcgcgggcaccgccgaagctttttgaaaagcagagataatctcagacggagtccccacttcccgcagaataagcgccatcgcttcgctttcggttttgcctttttccagatgatcacaaatggcatgatgaatatggctttcgatttcctttaataattcacggcttccggccttgcctttcagcccttttctgatttcctgcacataaaagtccttatccattctgcccgccccgcttcagcatccggtccatcaaagcagagaacagattccattccttcgtccgttcggctagaatggtttttccttcatcggtgatccggtaatattttcggtccggccctttggtctgcttttcccagtaagaagaaatatagctttggcgttcaaacttatgaagcgatgggtacagcgtgccttccttcatttgcagttcattcccgcttcttttctccatttctttcacaagttcatacccgtacatgggccgttcattcaggagcgtcagcaccagaatgaccgtgcttccctttacaagctccctgttgagcatttattttctcacccttacctagtaatcttatgtaggtattgtacgcacatcccctgcggctgtcaaatcattcctccaagccttccgtattgtgatcgggagaaaatctaactataatgagatataaaacactgatggaggccattgatatgtcaatgcacaaagcacttactattgccggttctgattccagcggcggcgcgggaattcaggccgatttaaaaacatttcaagaaaaaaacgtatacggaatgacggctttgaccgtgatcgtagcgatggacccggagaacagctgggatcatcaagtatttccgatcgatgccgatacgattcgcgcacagctggcgacgattgttgacggaatcggcgtagacgccatgaaaacgggaatgctccctaccgtggagatcatagagcttgcggcgaaaacgattaaagaaaaacagctgaagaatgtcgttatcgatcctgtcatggtctgcaaaggagcgaacgaagtgctgtatccggagcatgccgaagcgcttcgcacccaattggcgcctctggcaaccgtcatcacgccaaacctgtttgaagcaagccagctgagcgatatggatgaattaaaaacggtggaagacatgaaagaagcggccaagaaaattcacgaactcggcgcgaaatatgtattgattacaggcggaggcaaattgaaacatgaaaaagcgatcgacgtgctgtatgacggaaaaaccgcggaagtattagaaagcgaaatgattgatacaccttacacgcacggagccggatgcacattctccgccgccgtgacggcagaactggccaaaggcgctgaagtgaaggaagccatctatgcggcaaaagaatttatcactgcggcaatcaaagaatccttcccgctgaaccaatacatcggaccgactaaacattcggcgatgcgtcttagcggaaaataaaataaatatccccctcatgatcgagggggattatttcatttttttcgcggatgaccgcaaaaacatctcaatagactgcacaaacagcgcatattccttcatctgttcatatgtatgcatcagccgagcactccattcattgtgcggctcagctctcttgagcatgcgattgagctgaagcaatacttctttatattcttcccgcttatcttccacttgctctgcggctttgacaagtaaacatttcggcgtcatcttctgatttttcaaaactgagaaaacaactccttttattcctggaatcatagtctttcgtttgaagaatagcacagatggcataggtttcacataagaaaaaagaacgattttctacaaaagtgtccaaattgagccatttatttccgttttccctgccgaagtgacggttacgtcatcatttcccgggaaaggaaaatatctggcgctgaatacctcttctccatcattcaaaaacaattcgatggaggatgcatccagaaagagctgcacggaatgcacctcgccgatagcgcagcttctcttttctttttcttctccgctgaaagcggtgcgctccagcacagccagcccctcttcctgatgaaatacaaaccgggccgcaccccgaattgagatttcaaaaccggattcgcaagtaatgtcttccagcagcacttcagcccgggacgcatctttcaccgggaggcttacagacgagcaattcaattgaagccggcgcttttgttcatccgtgcggcgtgatttcatttccgggagcgggcgctgtataattcttccgtttgacagtgacagctgtctcggcatcgttaagcagtgaatccagtgatacgcatgggtcggatgtttgtcctcatgctgatccggaacgcccatccacgcaaacagaatcctccgtcccttatcatcttccagcgtctgcgccgcataaaaatcaaatcctctgtcaagctccgtaaattcaccgtgcttaaactctggcggctctgtatgcagcctgccgaggaaatagcccgcctggtggctgttatgatattttatcccgtcggcttcaagcccctgcggacatacgagcagcacgtcgattccgtcaagggaaaacaggtcgggacattcccacatatagcccaatgacccgagaccgccggagtccgcccccgcaatcgcaccgagaaacgtccaatccgtcaagttctctgatgtgaacaatacagcgcttccggtgagcttttctgtctgcgcgccgagcaccatgtaatacgctccgtctttcttccaaaccttcggatcacggaaatgagcggtatagccttccgggagacgcgcgacgactccttttttttcaaatacgatcccgtcttcggatacggcgaggcattgatacgtttcccgattgccttctccgtcacggacattgcctgtgtacatcaggcagagccgcccgtctttttcgatggcgcttccggaataacagccgtttttgtcataccactcacccggcgcaagcgcgatttcttcctctttccactcaacgaaatccttcgtcgtcacatgcgcccaaaatttcgcgccgtgccccgtatgaaatggctgccattgaaaaaacaagtgatatacgccgttccattggattacgccgttcggatcatttaaaagcccgaccggcggcataatatggtagttctggcggtatggatctgacgcggctgtttccccccgcttctttttcgcttcctcagcctgcaggcgcagctcttgatccggtgtcctcatttgacggcctccttttctttagctcccataatgtaagcggcaataaacgctgagacagaggcgatgcccattccgatcagatagtttataagatttcctaaaccgagcggagccgtgatggcaatcatcggaattccggtcagaccgtaggcattggcggcgacaccggtcaccacgacataggctcctcccagcgctccgccgatcattcccgcgataaacggcttgcggtaccttagattcacaccgaaaatgactggttcggttacgccgagaaaagcggaaaatgcggccggcagagcgatttctttcattttcgcttttttcgtcaggaaaaatacagccagtcccgccgcgccctgagcgacattcgccatcgaccagataggaaggatatagtttctgcctaaatcagcgatgaggccggcctcaatcgcatgaaagctgtgatgcacaccggtaagcacaataagcggataaagaccgccgaaaagcagtccggcaacaatgcccgcatgatcatacacatatgtcagcgagacggtaatgcctgatccgatcgtcctgccaagcggaccgattgcgataaaggtgataaatcctgtgacaatcaccgtgacaaacggcgtgaccaataaatcgaatgcgtgaggcacaatttttctcgtgcccttttccactttgctcataatgtaaacggctaacagtacggggatgaccgtcccttggtagccgagcagcgcaatgtcgaagccgaagagctgcataaaatcaggcgatgcatccgcaagcccccacggattcaaaagcgccggatggatcataattcccccgagcacggcaccgagataagcattaccgccaaattccttcgccgcgctgaacccgatgaatacgggcaggaagataaacgccgcgcttgaaaacatgtctaaaagcttaaacagcgatgattgttcagacacccagtgaaaagccttcatcatgccgagcagccccattaaaagtccgcttgccacgatagccggaatgatgggaacgaatatgttagacagtgtcttcgcaaatcttgcggccggattcagcttttttttcgctgcgtcctgatgtgtctcacgatcctcccgccccaaatcggcttcttttgaaaaagcgtcatacactttattcacgaggccggtgccgaatataatctgatattgccccgagctgctgaaagccccttttacgccttctatttcttcaatgccggcctggctgatcttctgttcatcttgaatgacgagcctgagccgcgtcgcgcaatgtgtcgcgctgatgatatttgattcccctccgatatgtttgataagctgttttgccgtttcttgataattcatgatgtatccccctttctaaaatcaaaaaagacctaaaattcgccaacgaaaaaggtcagcatgatccctttttcatgtacgcaaattttaggtcttgcctgcattaccagtcacaatcccgccggattcagttttttaatgcgctttcattttatttcatgatagcgctttcgtcaatatgttttcaaaaaaaagtctgtttctcgaaacagacgcgttattccgggtttttttgcagacgctggacatgcagcgtaatatagccggcctcggattccggcagttccaaatcatattcagttcttaaaaacgccgccagttcaagcgcacaccgataagcaaacggatactttttttggatgaaataaagcatctcctcgtccatggaatggagtgcttcatttgagtccaaccggctgaccgcataccgtaagtgcgtgacgaggcgctgataggaaatactgtcttcatccaccttctgttcgaaaaaggattcgatcttttcgatcatttctttgatcatggttgtatgcttcatcgccgaatacatgcttttggcatccgccttggcagtgtggatatgaagcgcgatataccccgcctcatcatcaggcaatgatataccgagggtttgtttcacgtgttcaaccgcccagcggccgatctcatattcttttttataaagcgccttaatttcatgaagcaatcggttatgcacctgaaggccgttttgaatcctttcgatcgcaaaggataaatggtccgccagcgcaatgtggatgtgatcgctcaaaggtgccgcaagctctccctccgcatggctgatgatatcttcagccgcctctatatgctcttcgggaagcgtttctaacacttgtttgaacttttcattttcgtcgtgcacgacaaatattttttcaattttatgtttttgaatcacatcattttttctcttttgaaaagcgattccgggacccattacgatcttttcccgtccgtcttcttttattaacgccgcattgttatttaatactttgtctattctcaagaggttcgctcccgttcatatgtttagtgggattgtaccctctttttcatatgatgtaaaggtgccggacccgcgcgctcccgtttcggcaattctttgcggacaggcatccatcggtttttatccagcccgccgcgggccgatttcgtttcatcggtcaaatccgccgatcggaaacggctcacaaacgaaaaagccccagccgtccgcttcgctttcttataataagccgcttggtttccatacacggcggctaatggatatcttccgttacccggcgccatccagttcatcagaaagaccatccacacccgtaaagatactagcaaacgtttcattgcaaatcatccctccgcttctttttgacagacagcttgttcgcaggcctgtttttctctccgctttaacggaaaaggcggccgatccttctccgctaaaaactagcgggtctagcaaccctatgactctatgatagacgcggccgggcgaattgtttgtcacaatatgagtgaaaaaacaaactagttttcagaagttttgttgaaagctgatggaaatgacctgaaaaatggaaaagtcgataaaaaaagttatacacaccttatcccttggttaagcacagcttaaacacagggtatatccacatatccacaaactcgatctatattttgtataggaacactcgttcccaacaatatatatacacaaattcattcagttatacacaggattctgtgtataactccctccttattcacagaccaatttccataaatgagtcatatgtcacaaggattattttgaattttcaagaaatatatactagatttctaatttagataaagaaaaagggggaaacacgattgaaaaaaggaatcatccgttatctgcttccggcttttgtcttatcctttaccttatccacaagttcacaggctgcgccggcttcaaaaccgcaaactcctgatcttgagaaggctgaggtgttcggtgacattgatatgaccaccggcaaacaaacgacagtcatcgtggagctgaaggaaaagtcactggcggaagcaaaggaactcggcaaagcacagacaaaaagcaagctgaaaagcgaacgcgcaaaagtgaaaaagaaagcgctcaaaactattaaacacggaaaaatcaacagggaatatgagcaagtgttttccggcttctccatgaaactcccggcaaatgaaatccccaaactgctgagtgatcaggatgtcaaagcggtttatccgaatgtcacctatcataccgatcagctcaaagataaagacatcaccctatctaaagatgccgtgtctccgcagatggatgacagcgcgccttatataggggcaaatgacgcgtggaagctcggctatacgggtaaaggcgtcaaggttgccattattgacaccggtgtcgaatataaacaccctgacttaaagaaaaatttcggacaatataaaggatacgattttgtggataacgattacgatcctgaagaaacgccgtccggtgatccgagaggcgcgtcgactgaccacggaacccatgtcgcgggcacggtagcggcaaacggaacgatcaaaggcgtcgcgccggatgctacactccttgcctaccgtgtgctcggtccgggcggaagcggaacaacggagaacgtcatcgccggcatcgaacgcgccgtacaggacggagcggatgtcatgaacctttctctcggcaattctgtgaataacccagactgggcgacaagcacggcgcttgactgggctatgtcagaaggcgtcacggccgttacatcaaacggaaacagcgggccgaacaattggaccgtcggctctccgggaacgtccagagaagccatctccgtcggagcgacccagctgccgctgaacgagtacgccgtctccttcggttcctattcctcagcgaaagtaatgggctacaacaaagaagatgacataaaagctctgaataaaaaagaaacagagctcatagaggcgggtatcggcgagcaaaaggattttgaaggcaaagatctgaaaggaaaagtcgctgtcgtcaaacggggcagcatcgcctttgtggataaagcagacaacgccaaaaaagcgggcgcgatcggtatggttgtgtataacaatgccccgggagaaattgaagccaacgtaccgggcatgtccgtgccgacgattaagctttcatcagaagacggcgaaacactcgtcagccaattaaaagcgggcggcacaaaagcgacattcaatttatccgtggctaaatcgctcactgaacaaatggcagacttttcgtcacgcggtccggttatggacacgtggatgattaaacctgacgtctccgctcccggcgtatacatcgtcagcaccattccgacccatgatccggccgacccgtacggctacggatcgaagcagggaacgagcatggcttccccgcatgtagccggcgcagctgccgtcatcaagcaggccaaaccgaaatggagcccggaacaaataaaagccgctctcatgaacacggccgaaaccttaacggacgcggacggtgacgtatacccgcataatgcgcaaggcgccggaagcatcagaatcatgaaggcgatcaaagcagactcccttgtcgccccgggaagttattcttacggaacgtttatgaaagacaaaggcaatgaaacgaaaaaagaaacctttacgattgaaaaccaatcgtccatcagaaaatcatatcagctcgagtactctttcaacggcacgggcattaccgtttcgggcacagaccgggtcgtgatccccgctcatcaaaccggaaaggtcaatgcgaaagtaaaggtcaatgtcaaaaaagtaaaggcaggcacctatgagggaaccgtcacagtgcgtgaaggcggaaaaacagtcgcaaaagtgccgacgctgctgattgtaaaagagccggactatccgcgcgtgacgtcaatcgacgtgcaggacggcacaacgcagggaacctaccaaattgaaacctatcttccggcgggagccgaagagcttgccttccttgtatatgacagcaatcttgactttgtcggccaagccggcatctacaaaaagcaggataaaggctatcaatatttcgactggaacggcaaagtcaatggtgacaccggactgccggcgggagaatattatatgctggcctatgccgcgaacaaagggaaatcaagccaggtgctgactgaaaaaccttttatcattgaataaccgaacaaccctgctggggcatcagcagggtttctttctgatcattcggcaaaagcttctcgaagcaggcggtatgactgaagtttatcttcaaaatgatgagtaatggttacagccatcacttcttccgttctgtatgctttactgagagccagaatctgttctttcacttgctgcttcgttccgatgatcattcgattccgattatcggcaattcgtctttgttcatacggtgtatacgtatttccgcggacggtttcgtaagacggtacgccgtgaagcggaatcccctgttcacccgcaagcagcgtataatccatgacggccgcgagttcctccgctttctcctccgtgtccgcgcacagcacaaacaccgccacggctgtttttggttcttttcctaatacagaaggtttaaatctgcgcttatattgtgctgtcgtgctttctccgccttctccattaataaagtgggcaaacatatagcctgctcccatttctgcgctcagaagcgcgctttcccccgaagaaccgagaagccagacttccggcgccgtcttaataaggggtgatgcggtcagattcggaaaacggtgattgtcatcagctgcatcatgcaaatacatcgccagctcacgaagctgctgcggatattgatcagcattccgcttcccgccgtcattcagcgcccatgatgcgatcggcattccgcccggcgcccgtcccaatccgagatcgattctgcccggcgtcaacccttcaagcacgcggaaattctccgccaccttatatgcgctgtaatgcggaagcatgacaccgcccgagcctacacgaatctcattcgttttcgccgcaatatggctgatcagcacttcagggcttgaacccgccaaccgctctgaaaaatgatgctctgacacccaaaacctcttatatccgagcttttccgcctcctgcgccagtcttactgtattccgcagcgcgctttccgcggaactcccttctgatacaggagattgatctaatatgcttaatgaaatcatcactgtcacctcatcaacatcgtaccactgctaagcttttttttctttctgtatgcttataagcatccctgatgataaacatatatataccttgttccattttgtcgaaatatgttacacgtgaaacataaaaacctctcccggtcaggagaggttttttcttaattcttttgaaaacctttatcttttacatattgatttaaataggttctcggtttttgtttcatgaactgcaggatttgatcagaccacgtttcaacccgcttgccgtttgtccgtttatcataataagcggaaatggtttcatcatattccttcatataactgcggaagtgttcttcattcgtatcgtacgtgttttcatgatatacggcttgtttcggcaggcgcggcttttgaccggacggatgagcgggatgaccgactaccaagccgaacagcggcagcacatggtcaggtgtaccaagcacttctgtcacctgatcaagttcatttcgaatgcctccgatataacaaatgccaagtcccattgattccgcggcaacacttacgttttgtgcggcaagtgcggcatcaatgacgctgaccataaacatttccgtattctcaagaagctcggtaatgttttcgcctttttcctcagcaagttttttatggcggtacaaatcagcgcaaaatacaaacaagtgcccgttattttcgacgtaaggctggtttccggccagtgccgccagcttccgctttttctctttatcggttacgccgatgatggagtaagcctgcacgtaactggacgttgacgccgcctgggcgcttttcactaatgtatctatctcttctgctgtcagaagctcgtcagtaaatgatcggatcgaccgatgattaagtatcgtttcgatggtattgttcatataaaagcctccttctctctatatcatatccgaaagggaatcatgtcaaaagcgaaatgctctaaacaaaaaaagacagcccgaaaaacgagccgtctcacattaagaattgaacaagtagcttttatatttcgtcagctgcacacttgcgttatatacgatcccgaagctgattaatgtagaaagcaccgagctccccccatagctgacaaacagcagcggaataccggtaaccggcataatgccgatattcatcccgatgttctggaaggtgtgaatcacgataagtgcagtaaatcctacgcaaaaaaacgcgccaaatcggttaaacgcatgcaagcggtcaatcagcaccacaagtctgtaaattaaaaagaaaaacatgacaaccgcaatggcgcagcctaaaaatccaaaactttcacccaaaatcgcaaagataaagtcggtctgtccctcaggtacgtacaccttcagattatgaatgccgtttccggtaatgccgcccgatccgatcgccataacggcctgatccacctgccagcttttatcgctctctgcctgagtcgttgccgcactggagtcagacatccacgatgtaatccggttaatttgataatccgcaatgccgattgaattcgccacatggggaaattcaatcacgagaactaagaaaaggccaagcacaagtgctgccgaaccgccgataatggtgatcagcttccagtttacacctgacataaacaccatcaccataacgataaacagacagatcgcacccgttccggcatcctgtaaaacgatcagcccgatcggaatgaccgtccatgccgcaattttcaaaagcagattgacatcttcccgaagtgatctttgatctttcgggcccgccttcgatataatggacgcgaccatcatcataattcctattttcgtaaactcagagggctggagggtaaagctgccgattttaaaccagctcttcgctccgtttttaatcggcgcgatggattccggcgccacacgtaaaaggagcagcgacagcacgccggcaattaacacgtacagactcagtttttcaagctgctctaaatcaaaatacatgatactgaccatgagaccggctccgatgacataaaagacgatctgtctcatccaggcatcacttccgtactgcccgaactgtccggccgcataaatcgccgcaacactaattattaaaaacacaccaaatataaaaatcaaatccccctgataatagggattttgctgtttcttatatcgactcattctatcccgccttacattttcatcggaagtcactattgtttattatacatgaacaccgttcaagaaaacatgatgaggttgcttcctttttattttttacggtttggggactacacgacatatgacgtgtcagaaaaggaaatgtttcggtcatgatgaaacttttccgataaaaaaccccttctcgtcagaaaaggggtttcagcctatgtttaacgtcataaacaagctgttcgggtcctctttataatgtgcaaacggatcacaatattgaaacccggctttttcatacaggcgtctggcggggagaaaagcctccatagaaccggtttccaagctgatccgctgatagccccgccgccttgcttcttcaatcatatggcggaggatccggttggctgcaccttttctgacatgatgccgagaggttttcattgatttgatctcaccgtgccggctgtttagctcctttaaggcaccgcagccgagcaggatgccgttttccctcgcactccaaaacgtaacgtcaggctgacgcagccggtccgcattgagcgcatgtatactttccggaggagaatgcatggtcatgctcttcagatgatcctgcaaaagcgcaatgacatccggcgctgtgacatcttctttccttacgtccacttcaaaccacccttgctgtgcatgtttctttgaccatagcaaaggttcacagcctgcgccattccattgtccggaaatgtgacagggtatttggcctttccggtttcttgtacctatccaaaaatgaggcaatagttgcaatacatttctcgaaaaagcggtatcaaaaattggaaaacatggtataataattgtaacaaaatgttcaaaaaacgaccacaaaacagacacatttcattctctgtatttcattttggaaacgctcccataaaatgaaaggagacatgtaagatggacatgttttttgcttatttactggtcgcaagcgcaacacccctctttatctggctggataacaaaaaagtcgctctttcggccataccgccaattattctcatgtgggttttcttctacttttacgcaaccagcagcctatcccctctcggccacacactcatgatcatcctgtttgccgtcaacgtcatcgttgcccatatcgccgcctttatcatttacggccttccgcgcttgcgccggagaagaagccaataaaggcacaaaaaaccctcttcgcctgaacgaagagggtttctttttattcctgatgttcggaatgatgcttcgcaccgccaggagggtttccatccatatggtcaccgtgatggtagtgcgccgcaaagatccagatggaaccaaggatgataacaatcgctccgaaaaatccgaagagcgtgtttccgacttgaattccgccgttttcgctttctgtcatgtgcatgaacatgagaagctgaagaccggcttggataaatgcgaatccgaaaatgatccagagttttgctgatgggcttaattccgtatatactgcaacccaaagggccagcagggtcagaataatagacaacgcaaaacctacgatatgcttccacggaaagtggctgtgttcagcagatttgtttgccatattatagtccccccaatccgatgagatagacgcctgtaaagatgaagatccaaacaacgtctaagaagtgccagtataaacttgagataaagatttttgaagacgtctgcggcgttaatccgcgtttcttcaattgcagtaagatgccggcaatccagaagataccgatcgttacgtgcgttccgtgcgttcccagaaggacgaagaatccagaccagaaagcacttgtaccgagagatgctccttcatgtacatagtggatgaactcgttaagctcacatccgacgaagcccgcgccaagaagaagcgtaatgatcgtccaaatgacgacgccttttaaacttccgcgacgcatttcatgaacagcgatcccgcaggtgaaactgctgatcagaagcaggaatgtcatgatcatgacaagcttcacttcaaataattcagccggtaagactcctcctgctgttcttctttgaagaacgaagaaggttgcaaatagtgttgagaacaacacaatctctgcccctaaaaagatccaaaacccgagaatattgagtctgccggtttcagattgatattccataggcgcgttagaattgccgtgttctgcatgttccataaatcacgcctcctttattcggaaatctttctttccgtctcttttatttcttcaacaggtatatagtagccattgtcatattcaaatgaacgaagcaccatgcaaagcagaatgccgatcaagccgacaatgcccatccagaaccattcaaatacaagtccgaagcctgcaataccgaacgccactgacataataagcggtcttccggagttgtgcggcatatggattttcttaaacttgctttccggatgaatatccgttttgtcttctttcaattgcaggtacgcatcttgagatttcacttcaggaagcaccgcaaagttgtaatgcggcggaatcgcagatgaagtcgcccactcaagcgtacgtcccacgccccatgaatctccgctgatctcgcgagtagagtagcggaagctgtagtagatgttgtagcaaaggattaagaatccgacacccatcatgaaggctccgacagttgaaataaagtttaatgcagtccatccgtcattcggtccgtaagtgtaaatacggcgaggcataccttgcagccccaagaagtattgagggaagaaacatacattaaatccgatcataaagatccagaagaaccattttccgattctttcgttcagcttgtggccgaacattttcggataccagaaaataaatcctgcgaaacatgcaaataccgtacccgcgatcagcacatagtggaagtgagatacgaggaagtacgtattatggtattgataatcggctgcagccatcgcaagcataacccctgttaccccgccgacaacgaagttcgggatgaacgcgagcgcccacagcatcggtgttgtaaaactgatccggcctttatacatcgtaaagagccagttaaagattttaaccccggtcggaaccgaaatcgccatcgttgtaatcgagaagaaagagttaacagacgcactgttccccattgtgaagaagtggtgagtccatacaaggaaactcaggacggaaatggcgataattgagccgaccatcgctttgtaaccgaataactgctttcttgcaaacgctgaaataatttcagagaaaataccgaatgccggtaagataacgatatatacttcagggtgtccccaaatccagaacaagttagcccaaagcatcggcataccgccggcttccagcgtgaaaaagtgagcgccgaacaaacggtcaaatgataacagcgccaatgccactgtcaaaacagggaaggcgaatacgataataaccattgtaatcagcgtcgtccatgtgaacatcggcatacgcatcagcgtcatgcctttcgtacgcattttcaggatcgtcaccataaagttgatacccgtcatcagcgtaccgataccggcaatctgaagaccgagcaggtagaagttctcaccaggcccgggactcatgtcgttgcttgccagcggcatgtaactcgtccagcctgcgttcggagaacctccgataacgaaagaaatattgaaaagcatcgcacctacgaagaacgtccagaaactcaggttgttcaagtaagggaatgctacgtcgcgcgcaccgatctgcaaaggtacgacaacgttgatcagaccgattaaaaacggcatcgccatgaagataatcatgatcgtaccgtgagtcgtaaagatctcattatagtggtttgagtctaaaaaactgttattaggaagcgctaactgggcgcgcatcatcaagccgtcgaccccgccgcggaacagcatgataacagcagagataatgtacatgattccaagtttcttatggtctacagacgtcagccattcagaccagagccatttccactttttgaagtatgtgagtacaacgatgatagcaatagtggaaagcgcaatggaaacttgtgcgcccagaattaatgggtcacctgttacaaaaaattcatcccatctcaatttcattcgggcttcctcctttcttgttcaatttcaatcttgtttatcgtcggatactttaaattcgtttttctttacatcttcccacgggtctgttttagagtgcggtgatacggctttgtagccaaggcgtttgcgcgcctccatcgcatattcggcatcttggccgtggtcaacgtattttaagtgtgtagaagagaacgttaatttaccgacattctccggaagcatcagttcgtcatacttctctttcgtcagctttggagaatcgctttgggcttttttcacccagctgttaaagtctttttgcgtaacagcttttacgttgaatttctggtcggcaaagtgttcgccggtgaagttcgcgttgcggccttcatatgttcccactttgtcagcctgtaagtattgatccatcagcattcccgccatcgcgtatttttgtcccccaagctgaggaatccatagcgatgccattgaatcggctgaagaaattttaaataaaaccggacggtctacaggaatgttcaggtagttaaccgtctcaatatcctgctcagggtagctgaatacccatttccagtctaccgaagtagcataaacaacaagaggctctttatcctttgtcgcttcaggcgctttttctaacgaatatatcgtctgtacggtaggcacagaaagtgcaataacaattaaaattgggatcactgtccagactacttctaagaacgtgttgccgtgcatctcgggcttgtaatttccgctgtctttgcctttgcggtcgcggtatttcactaaaatgattgtaaatagtacgaaaacgacgccgacaatgaacagcataaatccgattgacaagagaatcagatctttctgctggtctgctacaggtcctttcggatctaaaacggaaatgtcgctgcatccgcccagtacgaaaacaacagccaacatcgctaataaaagtaacggtttaaatgctctgaacaagaagatcaccatccttcctattgatgtagtgaatctgaaatgtactttctcaaaatcttttctctatctaccttgttatgctatcaaaatctgcccttattagctttatttttttctaaagttcatctttttttcgacctaatgtcacaaaatcgtcaaaaaatgcatgaactttttccacttgcgcaaaccaaacataaaaagttttagatcatttagcatatatagagaaaaaagatagtgagaacgaataataccaaataaaggtttaccataataaaaatcgctggtcaacaaaaagtttcattttgttaaacattctacaaaagaaatattttttcctttgctcacaccttttcacacggtttccattttaacgcaacgcattgtgaaaaaaaagaccgggacgcgccttgatatgttcattataaaaaacgcattcatatgtttaatatggacaaaacgaaggaaacatataggcataaataataaaaaataggaagtgatatttatgggttttatcgtatctctgattgtcgctattattatcggctggatcggaagtttatttgtaaaaggcagtatgcccggaggaatcatcgggtcaatgatagccggtctgatcggcgcatggatcgggcacggactgctcggcacatggggtcctcaccttgccggctttgccatcattccggcaatcatcggagctgcgatcgtggtattcttattcagcctgatcgccagaagcagaggataaaaaaaagcctcgtcccttatgggatgaggcttttttccggtagagcgcccaaatggcggataagccgccggaaagccgctctgccttcttctgtctgtttaaagacgccggcatgctccagtatccgcgcaaaggcatggccgatttcctctttcagaatctgttccgcgttttctttcgttaccttccgcttatgcagcacactgagcgcccaatctttatgctttgccgcagaagggtctgccgttaagaccgcttccgggtccggtgagcacagcgcttcagccgtgtatttcatttcttgttcaaggcggcccggcagaatcgcaagccccattacctcaatcagtccgatattttcttttttcaggtgatgaacttcctgatggggatgaaaaattcccagcggatgctcatcagaggtgcggttatttctgaggacgagatctaattcgaataaaccgtttctccgccgggcaatcggcgtaattgtattgtgcggtgtttctcctgaacaggcgaggagatcagccgcctcatcggaataaccgcgccatgcccgcaggatggcatccgccgcgccggaaagctcagacgcgctctcgctttgcaggcggatgaccgacatcggccacttcacaattcccaacaccgttttcggatagtcaggcagcttgtaccggctttctgtctccgcccgcgccatcgggaattcataattgcccccctgaaaatggtcgtggcttaaaatactgccgccgacaatcggcagatcagcattggaaccgagaaaataatgaggatactggctgacgaacgacagcagccggtcaaacgtttttttgctgatcttcatcggttcgtgccggtctttcaaaacgatgcaatgctcccggtaatacacatacggagaaaattgcagaaaccactgctcatcgccgagaattaccggaatgacacgaaggttttgacgcgccgggtgatccggtctcccctcgtacccgacattttctttacaaagaacacatctcggataatcggattgagactgctctttggcagcggcaattgctttcggatctttttccggttttgaaaggttgatcgtgatgtccagctttccgtaagccgtctcagccgtccacccgacattccgctgtattctatccgaacggatataatacacatcctctgaaaatcggtaaaacgcctttgtcgcctgctccggcccgtgcaccgcctttgtttcttcaaaacgacggacaatctcggacggctgcggggcaaagcagcccatgatcttcgcgctcagcaggtcgcgataggtgtctgtatcggctgcaatccggcccgtttctgccgcccattcataaatcggggccaatatgtccggcaatgatgccgccgattcattttctttctgttctgaaacctccggatgggtgatatgcaaagcttcatataaacggtttcttgtatattcaatatcaagataggaaatcagctctttttgcaatccgtaccggattaaacgttccacgtgccgctcaattgccatcgtcatccccctttagttctctcgctccggctccgacatccgccgtgtaaaagtcagcttttctccctgtcttttcctcatagcgggcccctgccgtttcaataaaatccgaaaccgcatcgtccttgacgatactgaccgtacagccgccgaaaccggctcccgtcatccttgatccgatcaccccgccgtggcgccaggccgcttcagccagtgtatccagctcatgactcgtcacctcgtagtcatcgcgtaaagagagatgcgaatccctcattaattcaccgatatgatgaagctgattgttactgaacatgtcggcggcctctattgtgcggtgattttcatagacggcgtgtttcgctcggcgtctgttcacttcattctgaatcagctccgcatgggcgtcaaaagcggaaggggtcagatctcccagtgattgaacggaaagatgcttctgaagatcacaaagcgcttccccgcactccttgagcctcgtattatagcctgagtctgcaagcgttcgttttttattggtatttgcaataacgatcgacagccccgacagcccgagttttgtatattcaaagctgagcgtcccgcaattcagcagaatcgcatgatgtttctttcccattccgatggcgaattgatccatcattccgcagctgacgccgataaaggaattttctgccgtctgagcgagcttcaccaagtcgagcatatccgcctcaagctcatggcattccttgagaatgaccgccgtgacaagttcaatcgaagccgaagatgacagccccgcgccgttcgggatgtttccccagaacacaatatcgaagccgtgcggaagggaaaaaccgctgccgagacattccgccatgacccctttcggataattggcccacccgtcctctttttgataacggatatcatcgagactgcattcctttatgcctgcctctttaaaattatgagagtacattctgacgagcctgtcccctctctcccggacggctgcatatgtaccgatcgtcagcgcgcacggaaagacgtggcccccgttataatccgtatgctctccgatgagattcactctgccaggcgcaaagaaaatgcgcaggtcctccgattccccgaatacatcagcaaacgctttctttattttgtgcttcatacgcatcccctttcaccattacactttcccccggggcgcggaaagaaacctttatgacacgccctcttctttcgcttttctgaagacaatccacttgctggccgcatagttgacgactacgataatgacgttatcggcgattttcgccagcgtttcgttcatatgaaattgactgaccagaagaatcatcatggcgagatcgatggcgagagacaatacccgcacgctgaaaaaggccgtcaattctttcatcagactccgcatccccgcggtcttttgctgaaatacatacagtttattcgtaacataagcaaatagaacggacagaatccaagcagcgacggtcgccgccttgtaatccatctcaaatgccgacgtcagaatgtaaaaactgacgatattcacgatggtcgtgaatatccccataatgatatacatcataatttctctgtagcgcatggcagttcctcgctttctgaaagacttttctaaaccttttgtcaaatcaagaagaacgttaccctgattttctgccgctgacaaaaacatagagcgcttcaaacatgctgcggaaagtaaccggccttccgagcacattggattgcttaatcatcccgtcgatgagcgcgcacatcattttagcggtatgctcggtatctatatggtcttctattaaatttctcgatttgagccaatttatgtacatggtgctttcttctatccataacttataaagacggatataagcttcatattcactgacgactttgtaattgggcatatgaacggcaaaagacacaacattccaggcaggcttgctgtttacaaaccgcatcaacaggctggccgcgcttaccgcagcttcacaaagcgtcaacggccgcgctgtttgcttttctaattcgtcgagatagccagtgataatcctttttttaatctgacgcctgtctaacaaatgcttcagaaaatcttccttactttcaaaatgaacgtaaaacgcgcctttgctgaaacccgccgctttactgatgtcatcgattgagactgaatcgtaagctctttcaatcaggagatgaaggcctgcgtcaataaaactttcaaatgtttcttctctcttaatttgaaatttgttttttttcattttttaccccagctgtttgatcattcactttatcttacaccgaatcattcttttgcggtattttttatgcaaaaagaatatgctagtcgacgctttgagggtaaatattaataggtcatatgatttatttttatttgcatactatccagtcagtatttatttgtttattattatatgtaagaattcttgaaggattttggttatttcagtcattttcttagggaataggtaggtgaattcatcttcaatttgggattaccggccaactatgtgtgatatttgttatacattggctgctgtagctgggcaaatcaatttttcaattggaggttcttatgaaaactcatgtaatgaaagatatagatcaagattggcaattgttaattcaagaggctagaatcatgggtttgcacattgacgatgtgaggcgcttcttaaatactgaaaaagcggtgaagaaaaaaacaccaatgaaaaacaccatccgccagcggtaagattacaggcggatccttttactatatgacctgccacagtccgcccgcacccgagttttcaaaggaacatccgcaataagaggggaatcagagaacaaaccgtataccggataaccattcccgtccgcattccgcaattgaacagccaaacatggtgatatgagatccccccgctgcatatcttgtgtatatgcccatttatgaggtgatacacagatggatacgaatccctattatgatgaaaaacaacagaactactacgaaggcctgaatccttatttattgaacaaaatagacgaaaactggcggacagtgcttgatgtcggctgcggcacaggcaatttaggagcggcgatcgaagaccgcggaataacggtttacggcattgaagcgtatcccgaagccgcaaaaaaggcggaaagcaaattgagccacgtgctttgcggcgacattgaatccgccattcttccgtacgaatcagaacaattcgactgcatgctgttcggagacgttcttgagcatcttgtcgacccgtggtccgtgctgaaaaagcttcgcccgtatgtaaaaaaagacggcacggtgcttgcatgcataccgaatgtcggccacatctcagtggtgctggagcttttagccggcaaatggacttacagtgacgccggattaatggatcagacccacctgcgtttttttacccgtgaagagacgctttcattatttaaagccgccggctatgaggtgaaacgcattgaggcgatccgcgttgatcacccctcttatcacaaagccatcgcatcattgcacgaagtatgcgtacagcttggcataaggcatgactttatgacagaagcatcggcgtatcaatatgtgattgaggccgagaggagcatgtaatggattcacattcatttctgtttgtcgtctgtgtgaatgacgagccgctctactcccggtgcaagagccatatcatgcagcttaccgtccccccttcatactccgttgatatcatgccgatatacgattcagcaagcatggcctcgtcctacaacaaagcgctgagacatccctccaaatataaaatttatctgcatcaggatacctttatcattcatcagcatttccttcatgacatgcttcatatctttcaatctcatcaggagctcggccttctcggtgtcgccggctgcaaaaccctgccgccgaacggcatttggtgggaaagcggacagcggatgggaaaagtgattgaataccgggggaatgcttatcaccccttggactttgagcacggtgatgaagacggcctgtttatgcccgctgccgccattgacggcttgttaatggcggctcaatatgacgtggagtggcgggaggatttgtttcgcggctttcatttttacgacacatcacagtcgcttgaatttcaaaaacacggatatcaagtcggcgtcgcctgccaaaaagacccttggtgccttcatttttgcggcgactcatttgacgccgcggcatatgaagcggacagacaaacatttgtcaaacactatatggcaaagccctctcgctgatcgagagggcttttttcgggttaacgtttattcagttcccgctcaatgatttgttcaaaggtttcctttcccgccgcgccagggattctctcatcgccgatgataaacgtcggcactgccgtaatgccggcttcctcataagcatggcggagcgcttcccgctgtacgtgtctgtacgctcttgtctcaagcgcctctttgaaggcagcgccgtcaagtcctgcttcttccgcaagctttgtcagcacgccaacgtcaccgatattttgttcttcctgaaagaacgcctgaaaaacgcgtgtatggtattcgcttcctttcccatgttcctttgcgaaatgaaagccttcaaatgccaaatccgtgtaaggatgcggtgatacgcgggggaatgtgatttcaacgcctaacgactgcgccatcggctcaatggagtttttccacatctgctgcttggcgggatcattcaccggatcaagtttcggcgaggggctcggacgcaattcaaacggcatccattccacctgtacgtccttgtccttgattgcttcttcaaacgccgctttgccgacaaagcaaaacggacatacataatcagaatatactttaatctgcagtgtcattgtaagtctcctttccttttcattttaagttgtaacatatatagttacaagtgtttttttaaaaacaccctccatatggaaggtgtcacgattccagcagcctttgggcgatatattctccttttttacagccgccgggacaggcgaataaggaagagccgatcgtttgtgtgtattcattcagcgcatcctttgccgccaaagccttcagcatcgggacaaattggcggtccgggtctttttgaaagcagataaacagcaggcctgcgtcaacatagcccgtcttcggatcaattccgtccgtataggaaaatgcccggcgcagaatctgtctgccggttgattttgccacgctgacatgcgagtcggcgggaatttgattcagcttcacgggatcggtttcctttttttgtccgaaaggcgcacccgagcttttcacccgaccgaacgtgtcctcttgttccttcaaggatgaacggtcccatatatctaaaaacatcttaattttcctaaacgccatgtacgtgccgcccgtcatccagtccggttctcctgattgaacccaaatgatcgaattcatcaggttttcatccttcgtgctttggttgccggtgccgtctttaaatccgaagaggttgcgcggtgtttctccgtttttcccgccgcttaagaaacctttattgagaaaacggacttcgcacacccccgatgcctgtttcatcaggttgcgcaccgcgtgaaacgccgtttgttcattatccgcgcagacttgtatgacgatatcaccgccgccttgtttcttatcgagcttgtcgttaggcatcggcggaatatcggcgaggtgcttcggttttttatctttcagtccgaagcggtctttcccgtctttctcgaaaaacccggggccgaagccgaaggtaacggtcaaattcgccggtgccagatcctgcgactccccgatatcctgcggaggcatatatttatttttctgttcgcccgacgggacggcgcctgaagtcagcagctgcgtcaggcttgtccattgtttgaaaagggagatgacatcggctttgtcgcttgacatgacatcaagcgccgcaaaatacacatacgtctgatgcgccgttgtgattcctgcttggtgcttcccgtaaaaaggaacgatttgatcacgatcccttttttcatcattcttctttgaagcggtggccgccggtttgaagagcggcgcgagtcctccgaggccgctcgctccgacagcaacggcggcgcccgcgacggcgccccacttcaggacatcccgtctgtggatctgtttttccttgttttgttcatcgctcatgctgtgtcttaactccttttaaagcacaccggcaatcttcgacatggtttcagaaagggccgtcagcttcgtgcttatctctctgatttgatctgtacttaatgtatcacaagacgtatacgattgatcgcacgttttgtatttcgacatcaaaacttcaaattcgctgaattccgcatcaagtttttccgtgacgtcgaaatgatctctcactgcgcgcttttcactgtttcgccgagggcttttgagccctcggcgccggcggtgattggttcaggcgtcactttgagagaagcgatagagccgtcaaacgttccggtcgatattgcaagctgattgtcctgttcttgacatacggcttatattctccaagtccgtcactgcctttttgcgcacacagaaaaagggccgccctatcgggacagccctgctttggagcgctgaatttcctctgaaaacttccgcgccgccgcttttggatcttcggcttggctgatggcgctgatcatgctgacgccgtctgcacccgcttcaatgacgggcgccgcgttgtcagccgtaatgccgccgattcctacaatcggaatggtgatgccctgacgccgcacctcttcaatcaatgtaacgccctgcacggcttcagcatctttttttgtttcggtcggatagaccgggcccattccgacgtaatcggctccggcttcttccgaccgcttcacctcggagacgttatgtgctgacacaccgagtatcatatcgccgattgccgctctcgtttcttcggcgtctgcgtcatcctgcccgatatgcactccgtccgcctcaaggcgcaaggccaattcgacatcatcattaatgatgaaaggaatcccggcctgcctgcagacatcctgcacctgcttcgcgaacaggacacgttcctcccctgttaaagaaccgctccccttttcccgaaattgaaaaagcgtagcgccgccctcaatggcttttttcaccacggaaacggggtctgcgcttgtattgtttgatcccataataaaataaaccgataacatatccttcatcatttcccgagaaatacgcgtcatttttctgtcaccctttcaattgcagcaagctcggccgcttcttgttctgagatgcttgccagcttgtttaaaagctcaatctggaagctgcccggccccttatgggaggtgtccaaagcggcaagctgagcggcgcttccgtatacagaaacggctgaaacggccgcttgcagaacgtcctgccccgctgcgcagaaggctccgatgacagacgtcagcaggcatcccgtccccgtcaccttcgtcagcagtttatcaccgttatgtacggcgtatgtgtcggtgccgtcggagataacgtcggtttttccggtaatcgcaatgaccgtcttcagcccgcttgcagccgtcttagcgagctgaaccacatctcctccggcttcccccgcatccacgccttttatcttccaatcaggggcgccggcaatattggcgatttccgcggcatttccgcgaatgacggacaagcggacctcctgtatgatcttgcgggctgatgccgtccgaaacggcgtggcgccggcgcctaccggatcaaaaatgaccggaacaccgttttcattggccgattttccggctgcgatcatagcttcaaccgacgccgaactgagggttcctatattcaggacgagcgctcctgcgattttcgccatgtcggctgcctcctcaattgcataagccataacgggcgatgcgccgagcgcgagcagtccgttagcggtgaagttcgtgacgacattattggtgatactgtgaacgagcgggttttgatcccgcactttactcaagtgttgagctgcggtttgtgcgtccatgcttaatcatccttttttctctttttcggattccataaatacgatttcgtatgctccagccaggctctggcggcaaaggacatatagcggtctttccgccaaatgatggctaaatgccacggaataaccggatgaacgagcggaatggttctgactttgtcaggatcaagaccgcggcagattctttccggcaagaggccgataccgagattggcggataccatttcgctgataaagtcccactgtgacgtttcataaatgacgtgaggcctgaatccggctttcacgcattccgtcataattcgattatgaaggacaaaatcctccctgaaaaatatgaacggctcttctttcaattcgtgaagactgcattctttctcgtcagcgagccgatgtgacggatggacgacgagcataagggtttccttgacgattgtgaacgtatgaaaaatttcttcattcgcgggaagcacgacgaccccgatatcaagcgagccgtcctccaccccttgctgcactttaatagagccgtcctcaacaagctgaaacgtcacatcgggatatgtgacgcgaaagtcaccgagcactctcggaaaaaagccggacccgatcatcggcggaagaccgatgcggacgtgccctttcttcacttccataatatcgttcagctctgacgtcaggttttggaatgactttgtaatttcctgcgcctgcacatacatgctctgcccggcgtcagtcagttcaacttgccggccattgcggtaaaacagcttaatgccgagctccgtctccaggtttttaatcatttttgagattgtcggctgtgaaacatacagagactgtgaggccttcgtaaagcttttcaaacgggcaacttccaaaaaatacgttaagtgccgaatatccattacatttcatcctttctatagacaaaaggaatacacattattctttatatgtattttacctatagcaaaaccttctgtacaatataaatataagggaggcatcattatgaaaaaattgctgcttaccgttattcaaatcgctctgctgtttatatttgcgcgtctgatcaattgggtcacggcggctcttcatataaatattcccggcagtataatcgggattgtgattcttttcacattattgcatttcaagattatcaaacttgaatggattgagcttggcgcagcatggctcctcggtgaactgctgctgtttttcatcccgtctgccgtcggagtgattgaatacggagatattatgtctaaattcggcgtaagcattttacttgtcgtcgtcatcagcacatttgtcgtgatggtttcaacaggtacgcttacacagctgatagcaaaaagaaaggagaaaaaacaaacgtgttcatcggaatcataagtttattcttaactgtcttagtatatttgggcgcgaaaaaactctacattcgttttccgcgggtctatacgtcgccgcttctgattacgcccgctgttttggtcgtactgctgcttcttgtcaatgtcccgtatcagacatacaatctcggcggcggactgctgaccgatatgcttcagccggcaacagtggcgttcgccatcccgctttataaatatttcccgattttaaagaaatacgccgtggaaattattttgaacgtagctgtcggttcatgtatcgccattctgtcaacggcctttatcgcgaaatggttccatctcggcagcagcttagtcgacagtctcgtgccgcgatccgtgacgacgccgattgccatgaacgtttcagaaatgatcggcgggatgccggccgttacagcggttttcgtcattttaacggctttattgggaacgatcatcgggccgatggtcatccgctatttccgcattgataacgaaattgcccggggcgtgctgctcggaactagcgcgcacggagcgggaacatctaaagcatttgagctcagctccgtatcaggaacgatctcaagcgtgtccatgattctcgccgcaattatgacgctgtgcgcggccccgattttgctttcgtttatgtcataaaagactgctccttacagagcggtctttttttatttgccacgcagcttgatttgtctgtccttcataaaaagacgaaaacacgatatgataagatatgaagtgaaaagactgaagaacggatgtgtcatatgaacggccagcagcgaagcagcatcagaaaaggacttgaagtcgatatcgtcctgaaagccgatcagcgttcaggaaagctgacaagaggaatcgtgaaggatattttgacgaactcaagcttccacccgcgcggcattaaggtccgccttgaagacgggcgaatcggccgggtgcagcacattattgaatagaaaaaagccggagcttcacgcccggctttttttctttaattttagcaatgaaatcctcatatgctctccctttatatacaaaaaatctttaaccaactattgactcttacgttgcgtaatactttagagtagccattaaggaggcggcaaacgtgatgggtatgaaagtaaaagaagtagctgaactgattggagtaagcatacgtactctccatcattacgatcaaattggattattgactcctcaggaaacgaccgattccggttatcggctttattcagaagagaatcttgaacagctgcagcagatactatttttcaaggagctcgatttctccttaaaagagattaaagaaatcattaatagtccttcatttaaccgaagggaggcattaattttacaaaagaaaatgttgattgagaaacggaatagagtcgataagatgattgaaaccatcgataaatcaatcaaacatatgatgggagagatttgcatgacgaacaaagagcggtttgagggaatgaacttcaatcataatctttatgaacaagaagctcgcaaacggtggggtgatcaacctgtcgataaggtaaatattagattgaaaagcatgactgatggtgagcaaaaagatttatctcataagtggactgcaatgttcaataaatttgcactccttattaaccaatctcccaactccccagacgtacaaacagctatcaaagagtggtttgattttctcaatgaaaattttggtgaatattcttttgatgccttttacggattaggtcaactctatattgaagataaacgcttcactaagaacatcgatcagtatggtgaagggttggcgaagctcatgagtgacgccattacaatttatatagatcatcaaaaaaagggtggtacccattaaaatcattatcgaggatacaattgggcaatacgaaacgttattttcaatgattgaaaatagagaagattattatcggtattcaatgatgaaaccttttgaagatatgtggaaaaagatgaatgttcccttaaaggcaaagcagcctaacggatatgatgtaatcatggctacaaatatgctgggctatctgagcatatttgatacggacaccggaagaaaagcattagagaatctaaaagaaattcaagctcttcaaattgcatatgacactttaactcattgtgtagaatttatcaaacaaaactgcttaaaaataaatgctgatgaaataaggtttgggatgtatctggccaatcaaaaaaagcttgagttacatagagggtattgtggattcggaggaattccgggatttattcaagtttcaatattccccaattcatatagcataccgagactgcctgctgtaatcgcacatgaatttcatcataatattcgtttttcgtatttcaattgggattatgggaacgtaacggttggtgattacttaattatagaggggttggcagaatcgtttgccaaagaactttacggagaagctctgttaggtccctgggttacttcttttgaaaaagaagacttagaatactcaaaagaaatcatcaaagactcgttaaatatgaaagggtttgctgaggtcagcagttacatgtttggcgacacctttgcagccgaacaaggttatcagcctgtcggcttatcaccgtttgcaggctacgcggttggctaccaagcagtgcaatccttcatgaaagccaacaatgtggggattagtgaggccactttacttggcacagatgagatactaagtaatagcgggttgtttctttaaacagtaagatatgaagatctattttatcccgtattaaagcgatggaagagggttttcttttcccctctttccacgctataaatgatcatcctattttttccgcaagaaaacaaccttcaaatagttcccttctttaaacgcgggaatcgttttgaaatcttccggaagcgtgtattcttccaaaatgtcgtaacgctcatttgtttctttaaaggcggtctctataaagcctttaaacttcttcatattgaaggcgctgctgtttgtcgaagcgacgatgatgccgttttttgcagtgatggcgatcgtttccttcagaaggtttttataatctttcgccgcgctgaacgtccgtttttttgtgcgggcgaaagaaggcggatcaaggatgatgaggtcaaactccagcccttttttctccgcatagccgaagtatttgaaaacatccatgactttaatgtcatgcgcctcataatcaattccgttggcgctgaactgttcaatcgtttttgcgagactgcggttggcgacatcgacgctggtcgttttctcagctccgccaagcgccgccgcaacggaaaatgcccctgtataagagaacgtattcagcacccgtctgccatttgcatacttgtcccgaatcgctttgcgcacatgacgctggtctaagaaaatgcccgtcatcgccccgtcgtttaaatccaccgcgtaccgtatgccgttttctagaacaatgaccggaaaatctcctctttcgcctttgacaaaatcgtcgtcttccacgtattgcccggcagtatcgaatcgtttcttttcatagatcgctttataagaaagctccagtccgtcaatcgcctcaatcatgctgtccttataagcgtaaatgcctttactgtaccattgaatcagcagataaccgtcataaaagtcaatcgtgacgccgccgatgccgtcgccctcaccgttgaacagccggaacgccgtcgtgtcgggcgccttaaacagatgagctctcgcttcagccgcttttttcagcttgtccagaaagaaacgtccgtcgatccgttcatctctcgcgcgggacagcacccagccgactcctttattctgcaaaccgtaatagccttttccgataaactcacccttctcggatgtcacatcaaaaagatcgccctctgttaaatgagccgagcttccggacagagcgtctttttcaatcagggggaatccttttttcagctttccggcaaatgtatctttcactgtaagtagcttcattgtgcattcctctttcgttttgctttctcttatcgtaccataaaacatgatcaacaccgcattgtcccgaaaaattcaaaacagggggaaaaccatgacagccaaaagaatcgaccatacaggcattatggtcaaagatattgaaacatccatcgccttttatcaagacgttctcggtatgcagttaaaggatcgtatcactcatacgaacggcattattgaacttgcctttctcggctttcaggaagggccggagacagaaattgagctgatccagggctacagcagcgagcttcccgcagaaggaaaagtccatcatgtcgctttattaactgaagatatcgcggcggagttcacgcatgcgaagcgtcagggcgccgtatttatcgatgaagaaatcacgacgcttccgaacgggtaccgctacttttacattgaaggacctgacggcgaatggatcgaatttttccagcgttaaaaaaacgggcgaaagcgcccgttttttttatgtttcttcagtgacgttttgttccgccgcccgttcctctctccatttttgaagatcccaaattcggaaaaacggataatagatgataaatgtaatcaggagattgatcagctgcatgaccgaaccggagattttcccgcccgtcgccaaataaccggaaatcagcggcggcatcgtccacggcacggcgattcccgccggttttgccaccatccccgtgctcatcccgatgtacgtcgccgtaatggtcaagagcggcgcaatgataaagggcacgattaacagcggattcatgacgagcggcatcccgaaaataatcggttcgttaatgttaaaaatcgcgggcccgattccgagacggccgagctgtttcatctgtttgcttctggagcgcacaagcatggtcagcacaagggcaagcgtcgctccgcttccgccgacattaatccatatttgaaagaactgtgtcgtaaaaatgctcggcagcgcttctcccgcctgaaaagccaaacggttggcatccatcgccccgtaccagatcggcgacatgacgccgccgataatggacgcgccgtgtatgccgcacgaccaaagcagcatttgcacgaattcggcgataagacttccgccgagactcccgcccagaatagacagcggggtgcccagcagatcgcctacgacattgtggaggcttttaaaaggagttatttcaataaacagacgggccagccatacaagcgtaataataatgaaaccggggatgagcgcaacgaacgatttactgaccgcaggcggcactccgtcaggcattttaatgacgatatttctttgtatgataaaccggtacacttccgtagacagcattgcaatgatcatcgcgacaaacagacctttgcttccgagcagcgaaatcggaatgccgcctcccaccataatctctgttgccgagccgtcaggaataaacggaatctgatacggcgtcgccaataaaaaggcggcaagggcaatggctcccgacgacagggcatccacctcatagctttccgcaagccggtaggcaatcccaaaggcggcgacaagcgccataatgtcaaaggacgcattcacgggatacccgagcttttcaacccaattttcaccgaaaagaccagccataaaatcggcataaccgggaatcggaagactcgtcagaatcagaaaaaccgatccgatgatgataagcggcatagtcaaaataatgccgtcccgcaaagctcttaagtgcctttggccggcgacttttccggcgacaggcatgattttttcttccatgacccgattgaacgtactcatttatcaaaaaccccctttttgagttcattgcgcagatgtcttaaagcattttctccatcatattttggaaacgcttacatttgcatacagaaattttccttatccctcaggaaaaaaagaattccgcactgccgatatataaagaaaaagggggaattgcaatgtatcacaccctgaaaccgataatggccgcggccttgtgcgccggcctgttctccgccgcggcgcccccgcacgccgagacgcacgaccgggacgttatcgtggtgtacaaaaatcaaaacggcaaggaatccgccatagacagcggagcggatgtggaacagacctatcagcatctcccggcagtcgccgtgtcagccgattcacaaacggtgaaagacctgaaacaggaccctgacatcttatatgtagaagacaatgtatcctttcaggcagcaggcggttctgatatccgcccgttatcagcggcccaaagcagcagttacgcgctgccgcaatgggatatagaaccgactcaggtcaagcaggcgtggaaagaaggcttgacgggaaaaaaggtgaaagtggctgtcattgacagcggcatttaccctcatgatgacctttccattgccggaggctattccgcagtcagctatacttcttcatacaaagatgacaacggacacgggacgcatgtcgccggaatcattgcggcaaaacatgacggatacggcattgacggcatcgcgccggatgtccggttatatgcggttaaagcattagacagaaagggtgcaggggatcttaaaagccttcttaaagcgatcgactggtcgatcgccaataaaatggacatcatcaatatgagcctcggaactaacgcagacagcaaaattcttcacgacgccgtagacaaagcatacaaaaaaggaatcgtgatcgtagccgccgcaggaaacgacggcaacaaaaaacccgtcaattatccgggtgcctacagcagcgtaacggcagtctcagcgtcaactgaaaaaaacgggctcgcggctttttccacgaccggaaaacaaattgagtttgccgcacccggcaccaatattacgagcacgtatctgaatcaaatgtacgccacggctgacggcacatctcaagccgcgccccacgtcaccggcatgttcgcgctgctcaggcagaaatatcccgaggaaacaaatacacagctccggcagcagatgcagcaaaacgtcaaagatctgggcgctcccggacgtgacaaccgattcgggtacggcctggtgcaatatcacgtaaagcaaaagagctttgccgaacgggccgtaataaaagcggaaaagacgaaaaaacaggcagatatcaatcaagcaaaaacggccgtcagcaagctgtccaagtcaaagggaaaaaccgctctcgagtcccggatcaataaagttcagacggcaagaaatgtgacggacgcaagagacaaagtccggactgccgaaaaacaaaagaaaaaaaccgccgttaatgccgcacaaagcgccattcgcaaattaccggccggttcagagaaaaaagggctgcaaaagcggctgaacgctgtcaactcaagccttttgaaaacagctgaagccagcgtcaaacaggcggaaaaaaagacctccgaggccagcaccgcaaaagcccaaaaagcagtcagcgaaatccagccgggaaaagaaaaaaccgctctggaaaaacggcttgagaggataaaagataaactcaaccggcagcaggctagagacaaagtaaaaacggctgaaaaaaccaagacgaaaaaagcaaaatcagcggcgcaaacggcagtcagccgattgcagccgtctgccgaaaagaccggcctgcaaaaacgcgtgcgtgcgattcgggtgaaatagcaaaaaaacgcttatgagccggataacggcttcacaagcgtttcatcacacctgcctattggttcatggccgggcggtcgatcgtgttccatttcgtaaaggacatatatcggaaataatgatcacgatacgggtgcgaggtgcctgtattccaaggcttgtcgctgccgcagaaatggacgatggccggttcggcacgtgtttctctgtaacgtatacggtcgatcagttcaggaggcgttttctcattcatgataatatgcgtctgcgcgttccagcgcggatgcagttcatgccattgatcatataagatcgcgttaagcgcgtcctgatcatgaaacacgagaaaatcctccgagctgttttcgttgataaaatcaatcaccttttcggaaatattttgttttctccaaggttcgaaatctataatcataatgccggaattaaaatacttggcagtttcgctgatattcatttttttcagcctttcatgctgtccggcgtcttctaccgccgcaactattgccggggaaatatccaaatcccataaagccgaaatatcttccatcacaattgcatcgcaatcaatgtaaatcatccgttttacggactcatcctttattaaatcagggatggaaatgcggtaataagccgcttttgtaatgtggctgctttcgactgcatgcttgtattgatcagcgtctacttctaaaaattcaagcggcgtcccgaatgacatcgcggtctgttcaagcttgtccttgttttcggcagtaattccgccgtcgattacatataatttcgcatcccttgttttatccatattcatcaataaagaagcgaacatcccacccaaatgacgagcataatgatcatcggcacatgatacgatatgcattgtttcattctttcccactgatattcatctccctttttgttgtacaaatgtctttccctttttttaaaaagtaaacctcgatcttacacattctttctgcgggaatgtgctgtttacgatttgatatctattgcattctctgttaaaattcatttcatagctaatgattctgacaataataaggagcatgacgccattgacgaatcgcaacgatgccggatcagacaataagaagccgaacaggcctttttccgatctatccggccgaaacaaagaggcggcctatattgccgctgcactctatcggtccgcccagcagctccgtgtaaaaatggagaaagaggtgctgtcggcacacaaattatcatggacggcgttttctatcctgtatgacctttgtgaatgggaaacgcttgatacaagaaggatagccgctctatccggaattaccgcggcgacggcgagcaatgtcctgaagactttggagaagaagggcttatgcagcagacaaacgaacaaaagagaccgcaggcttgtattcgtcaatattaccgatgagggcagaaaggttattgaagacctttaccccgactttcatcagggggaaattgaactgacggcctgtctggataaacaggaacaaaaaacgctgtccgccctgctgcaaaaaatcgctgacaatttcataacatagcagctatgacgggaatcagtaacggattgtctccctgtttcagagagccggcggatggtgcaagccggcacaaagacaaacgtgaattacctccctgagctttctttgtgaacttcagtagcaaagaacgggaaaccgttattcgaatgagcggaagacgtcgtcttcaatcagggtggtaccgcgtgcatacagccacgtcccttttgggatgcggcttttttgtttggctaaaaaaaggaggatgtaaaagatggaatcaatcactttaacgaatgatcaggaaaaagaagtgcaaaggcagctggatttgtacatgaccggcgccgcggacgtcataccgcctgaagaattgagaaataaaatcgccaaatcagtggcatccggcaagccgctgaacattaaactcggccttgatccgtccgcacccgacgtccacttgggccataccgtcgtgttaaacaaactgcgccaatttcaagaaaacggccatattatacagcttgttatcggggattttaccggaaaaatcggtgatccgacggggaagtcgcaagccagaaaacagctgactgatgaagaagtccaacacaatgccaaaacctattttgaacagtttggcaaggtgctggatcaagacaaagttgaacttcactgcaactcaaaatggctgaagacattgaatctggaagatgtgattgaattagcggggaaaattactgtcgcccgtctgatggagcgcgacgactttgaggagcgcatcgccatgaaaaaaccgatctcacttcacgaattcttttacccgctgatgcagggttacgattctgtcgttctcgaaagcgatatcgaactcggcggtacggaccagcattttaacgtgctgatgggccgccatttccaagaacgctacaaaaaagaaaagcaggtcgtcatcctcatgccgcttttggagggtcttgacggagttgaaaaaatgtctaaatcaaaaaacaactacatcggtattgacgagcatccgaacgacatgtacggcaaaacgatgtcattgccggacagcctgatgaaaacatatattcatttagcgacagacttagagcctgcggagaaaaaacagatggagaaggatttggaatcaggaaagcttcatccgagagatgccaaaatgatcttagcgggtacaatcgtcagaatgtaccacggcaggaaagcggcggatgcggcagaacagcatttcaagcgtgtcttccagcaaaacagcctgcctgaagatatgaaaaccgtcatatgggacggagaaaagaccgtgccccttattgagctgctcgtcacgattggactcttttcttcaaaaagcgaagcacgccgtatgattcaaaacggcggagtcaaagtgaacggggagaaaacggatgcccttcataccgtcattaccgcagaagacggcatgacgattcaggtgggcaagcgaaaatttgtacagctgcgcgtaaacggataaataaacagccggactgcacataaaagcggtccggctggttgtgatgggtcaatcgtttaatcgacttctttcttaatcccaagcatcttttcgtctaaataatgggcgatgtccgctgcttccttcaactcgtcggtcagatgctttgggacttcgttatttaatttgtaataaattttatgttcaaggctcgcccaaaaatccatggcaatggtgcggatttgaatttccgccttcacatattccacacgattcgtcaaataaacgggaatttcaataatcaaatgcaggctgcggtagccgttcggcttcgggtgtttgatataatccttcacctttacgatcttcaggtccttatgctgcttcaaaacctcagcgacattataaatatcggaaataaaggaacagataatcctgacacccgcaatatcatgaatatgctctttcatttcctgcgtcgtcacatcacagcctttgcgcatcagtttattgacgatactctcgaaactttttacgcgtgattttgtatgctcgatcgggttatgcccgtgaatcagattatattcctggctgatgatagaaaacttcgtatccagctcatctaaagcgaatttataaactaataattcatttttccaatcttccatgaccgttttcaaatcatccatatgggctgttgacaagtccatttttttcatctccttgctttgctgtccgtatataagacggatcagtccgcggtcaggttctttacaaaatcgtgaagattatgtcataaaaaaaagcaaatgccggttatggcatttgccttttcatttgatcagcggaaataactgatcaggagtccgatggaaagcaggaatccgaaaaatgtattggtttgcgccgttgatttcatcgcaataatcatgttcatcggcatttcgtttttcacaaagcctttcacggcctgaacgggtttcggcacgctcaggaagaccaggaacagccacgggcttgtgtaacccatgatgacaagaccgatgatccagatgtaagcgatggcaaaagatgcggccagtatcatgacggcccctctatgccccatcaaaatggccagggttttacgtccgccctttttatcttcctcaatatcacggatattgttggacagattaatggctccgaccaagatggcgatcgggatggaaatcaaaatgctctgttcattaattctgcctgtctgaatgaagaaagaaataaggacaaatacagagcccatgcaaatgccggagaacagttccccgaacggtgtatacgcaatcggcaacgggccgcccgtatacagatagccgatcagcatgccggcaaggccgatagccgcaagccaccagctgctgctcatgcagatataaacaccgagcacgagggcaatcgcataagagccgagcgccagctgcagaattgttttcggcttcatgccgtgacggacgatcgctccgccgataccgacggaatcctccgtatctaaaccgcgtttaaaatcgtaatattcattgaataagttcgtggcgatctggatccaaaggcaggaaaacagcatggccaaaaacagcaggaaatcaacctttacgtaaaacatcgccaatacggtgccgagaagtacgggcacaaacgatgccgtcaatgtatgagggcgggttagctgccacaaaatgcggcccatgctttctttctcgggcgtcttttggccgccccccatattgttttgattcattttcctcttcctttctattaaaaggctttcacagtcagccgataacagtagtgttgaattggggttttcacgttttctgctaccttatctatcataataatttcttcctcatttcacaagatgcggcgctttatcggctatcctgccggaaacggcttttcgcccttctccattggggttcggcacaagcctgcttaagaaaaagccgccaaaatttttttacctcgtttatatttacgataagttaaaaatcccgcctgaacagcgcctttttagtatgatcatttgccaatttatacatgcgtgttttccatccttttgtttctcattcatttttaaggaaattttaagcttaggatattagacatattttgaaactttttgttaatctaatcgtcatatactggtgtaattattgaatacgcggggaaggaattttgaatatgatgcaaaaattaaaacgtgcttatgaaaatacattgatcaaatggacgtttcatacgggcttttattttctgatattagtattgctcttttggatgtatggatttcatacagcgaataccggcacttatatttacaacgatttctaatcggggaggataactatgaaactacttgatgctataaaaacatacgcagacgccaagccgcaggccgaagcgtttcgttccttagatcattccctcacttacggggaattatgggatttgtcggagcgggttgcgtccggcattcaaaaacatacagctgacggttcgaaagcgcctgtcctggtttacggacatatggagccgaatatgatcgtttctttcttaggaagcgtcaaagcgggccgcccttacatccctgtcgatgtttccattccggcggagcggatcgtcaaaatcattgaaagctcaggcgcagagctgcttatcagcgtatcgggcgatgcagtcgatacgggaagcaatctgattaaaaccgttacgcccgaagagcttgcagctgacggagatgcagacctcagccgtgagaactgggtaaaagagctggacacgttttacattatttacacgtccggcagcacgggaaatccgaagggcgtgcagatatcggctgataacctgcaaagctttactgactggatctgcagggattttcctgtgggcgagggtaagactttcttaaaccaagctccgttttcttttgatttatctgtcatggacattttcccgtcgcttcaaacgggaggtacgctgcactgcgtaacgaaagacaaaatcaataaaccgaaagtactatttgaagagctggagaaatccaaactgaacgtctggacatcgacgccgtctttcgtccaaatgtgtctgatggaccccggctttacgcaggagctcctgcctgaggcagaagtatttatgttttgcggagaagcgcttccggctgccgtggcacaggagctgttaaaccgttttccgaaggcccgcgtattcaatacatacggcccgactgaaacaacggttgccgtcacctccgttgaaattacgcagcagatcatcgatgaaaatgaatccctgcccgtcggttttgcaaaacccgatatggatatcttcatcatggatgaaaacgggaataagcttccggacggagaaaaaggggaaatcatcatcgcgggcccgagcgtaagcaaaggctatctcggagaaccttctctgacggaaaaagcgtttttcccgatcgacggccagtgggcatatcacacgggtgatgccggttatgttcaggatggtcagattttctgccaaggacgccttgatttccagattaagcttcacggctaccgcatggagctggaggaaatcgaagtacatgtaaggcagtctcaatatgtgcgcacggcggttgtcatcccgtatcagcctaacggacctgtcgaatatctaattgccgccatcgtgcctgaaaaacatgattttgaaaaagaattccagctgacaagcgccattaagaaagaactggccgcttcgcttccggcctacatgattccgagaaaattcatttatcaggatcacattcaaatgactgcgaacggaaaaatcgaccgtaaacgcattggcgaagaggttcttgtatgacgccttacagctcgtttttcttctttatcttacttggaatccttcttttgccgacgattattttagggctgaacggcaagagattccaaggatacaacatgtttatatccatcatcgtattggctttgattttcgcgcatgatctgcacggcgtgatcgcactatgtatctttacgctgtggcaggtgcttttaatcaggggttatctcgcttacagactgaaagccaacagcggctttgtcttcagtatggccgtgatcgcgtccattttacccctgtttttatctaaattatggccgtttttctttccgccggtgcctcatcacccggttcataacctgatcagtttcttaggaatttcttatttgacatttaaaggcgtccagctgatcatggaaacgagagacgggctgattaaagaaaaaatgccgcttcaccgccttttgtactttattatgtttttcccgaccatttcttccggtccgatcgacagataccgcagatttgccaaggacgaacagaaagtatggacaaagggagaatacgctgatttactgtataccggcattcataaaatttttatcggtttcttatacaaattcattatcggatatgcgattaacacgtatttcattatgaatctgtctcatatcacccacagcaaactgtggggtaatgtgctgtacatgtacggatacagcttatacctgttttttgattttgcgggttacacgatgtttgccgtcggtgtaagctatatcatgggtatcaaatctccggaaaactttaataagccgtttatcagcaaaaacattaaagacttctggaaccgctggcacatgtccttatccttctggttcagagactacgtatttatgcgctttgttttctggatgacaaagaaaaaatggataaagaaccggatggccgtctcgaacatcgggtatttcctgctgttcatgctgatgggcgtctggcacggactcgccctgcaatatattatatacggcctgtaccacgccgtattaatgaccgggtataacttttttgagaaatggaataagaaatacaagtggctgcccgccaatcgttttacggcctttttagccatcgtcatcacattccatttcgtatgtttcggattttatattttctcaggaaaaccatttcatcactaaaggagattgaaaacacatggaatttaaacaggaagtattagacgtattagctgaagtttgtcaggaggacgctgtgaaagaaaatcctgatattgaaatctttgaagaaggactgcttgattctttcggaactgtagaactgcttgtcgccatcgaaaaccgcttcggcattacagtgccgatcactgaatttgaccgtgacgagtggaatacgccaaacaacattgtaaacaaactgactgagttgaagtaaatgaaaaagcgtttctttggaccaattattttagcgttcgtcctgtttgtcggagctatcgcagttccggcttcatggcttacgcgcttcattcctgaaaaacgtgtcgaagagtcggcggcagccttaaatccgaatatgttccaggggctctatcttcaaaacaaaatgttcgaagactcgaagtatctgccgattttcggttcttccgagctttcaagactggatgagtttcacccgtccaactatttccaagtgaacaaccaaggctttacgccttatcttgtcggaaaaggcggggaccaatccttgatacacgccgtgaactttgcggcgcattatcagcagctgaaaggcaaaaagctggtattcattgtttctccgcaatggtttatcaaaaaaggttctgatgaacagcactttgcgccgaatttttcatcacttcaggcattggatttagcatttaataaccagattgatcccgcggtcaaaaagaacatgatgaagcgcatgctccgttttaaagtcgttcagcatgatgccgtcctttctgaattgtacaagggaatggtcaacggacaatcatggaaagtgaaagcggtcatgccggccgccaaagcttattattctctgcttgagaaaaaagatctttattattcaatgggagaaaacaagggccctgaacggacgatctctgaaaacctgaaagggaaatcgtggtcagagttaaaaacagccgccgctcaattaggagaacggagctccaagtccaatcctttctatatcgatgatgcttcttataaaaagattaagaagaaagtaaagagagtgaaaggaatcaacaaaggaagaacatacgccaaatcagtcgaatatcacgactttgaggatatgctggacattctgaaagatgccggcgctgaaccgatgttcgtggttattccggtcaacggaaaatggtatgactacaccggcttcccgaaaaagggccggactgattactacaaaaaagtcactaagcaaattaaagcgaagggctttcaggttgccgacttatccgggcacgaatatgatccgtactttatgaaagacaccatccatatcgcctggaagggctgggtgtacgtcgataaagcaatggagcagttttacaaaaccggcaaggtgacggttcactgagcacggtgatgacagaatacgtaaaaacgaacacgcagggggcattctctcccctgctttttatgtgatttgattttttcacaaatttgaggaaaactattgcgaatatttgttgaaggtatacaatagaatataaattattttcaaataagtttgacaataacaccaatagggagacagaacattatgaaacaagacattcgtgttgaattgacttcagccaaaaaaccgaaaccggacccccatgaccttgcgttcggcagaattttcaccgaccatatgtttgttatggattacgacgccgatcaaggctggtatgatccgagaattatcccttatcagtccatctcaatggatcctgcggccatggtttatcattacggccaaaccgtttttgaagggcttaaagcgtatgtaacgaaggatcaggaagtgcttctgttcagaccggagaaaaatatggaccgcctgaaccagtcaaatgaccgcctttgcatcccgctcattgatgaagagcttgttcttgaaggcctgaaacagctcgtagccatcgacaaagactggattccgaaagcggaaggcacttccctttatatccgtccgtttatcattgcgactgagcctttcctcggtgtagcggcatcccatacgtacaagctgtttatcattctttccccggtcggctcttattacaaagaaggcattaaaccggtaaaaatcgccgtggaaaacgaattcgtgcgcgccgtcaaaggcggcaccggaaacgcgaaaaccgccggcaactacgcatcaagcctgaaagcgcagcaggttgcggaagagaagggattttcccaggttttatggcttgacggcattgagaaaaaatacatcgaagaagtaggcagcatgaacatcttcttcaaaatcagcggtgaaatcgtgacgccggagctgaacggaagcattcttgaaggaattacgagaaattccgtcatcacccttctcaaacattggggactgactgtgtctgagcggaagatttcgatcgatgaaatcatccaggcgcatcgtgacggccgattggaagaaacattcggaaccggtacggctgcggtcatttctccggtcggcgaactgatctggaatgatgaaagtcttgtcatcggcagcggtgaaaccggagagatctcgaagaaattgtatgataccattacaggcattcaaaaaggcgcggaagccgacgtgttcggctggacgacggaagtcgcctcactaagcgaatcaaaataagcaaaaaacccggaagcgaatccgggttttttactgctcttatgcttcaatcgacttaaagaaatgaggcagatgttctttgtgggcctcaagcatttcatccagaatggcctttgccacggagtctgacgggacgagaggattgatcgtcatcgcaagtagcgccgtttgataatctcccgtgacggctgcttcagcggcgacacgctcaaatgatttgatttgctggacgagtccgcggacagacaccggcagatcaccgacggcgatcggtttcggaccgtctttcgtcataacacagtttacttcgaccgctgagtcattcggaatgctggcgatcgcgccgttgtttatcgtattgacgggctggatatcatgtttgtcgttatagatggagctgatcaggttgcaggccgcgtcactgtagtacgctccgccccgtttttcaagctgcggcggtttgatggcgagattcggatctttgtacagttcgaacagttctttctcaaccttctgcacgacctcggcgcgtgtgccctccgtctgtgacgcttctatttcatgctcgagcatttctttcgttttgaaataatagcggtggtagccgcaaggaatcagatcgagcgccttcaggaattcaggctcccattccgcgcctgagatatttttcatcgtcatggcgtttttcgggtctcccatggcttcaatgacttgatctttcacgctgacgccgtctaagaaaacatctaatccgaagaccatgtgattcagcccggcaaattgcacttcgatccggctgacatccacgtccaatgcttttgcgacgcccattttaatgccgatcggcacattgcagagaccgacgacttttgtgagattcgagtagcggagcaaggcctcggtaaccatgccggcagggtttgtgaaattcacgagccatgcattcggacaaagctcttcgatgtctttcgcgatttccagaataaccgggatggtgcgcagccctttgaataaaccgcccggaccgtttgtctcctggccgattacgccgtattttaacggaatccgttcatctttggcgcgggcctcaagaaggccgacgcggaattgagtcgttacgaaatccgcatccttcaaggcttctctccggtcaagcgtcaggtgaatctctatcggaacacccgctttttcgaccatgcgttttgcaagcgtgccgacaatattgagttttttctcgccttcgggaatgtcgacgagccataattctctgacaggcagttcctcatagcgtttaatgatgccttccacaagctccggtgtatagcttgaacctccgccgatcgttacaattttaattccttttgtcatatttttgctcccccttgcagactcactttttcgtaaatctcgactaactcagcggccaagtctttcacggtcatggcattcattaaatgatcttgcgcatgcaccatcaaaagcgtcatgtctgttttttctccgccggcttcattttggatcagttctgtctgataatgatgggcttcggtcagttcccttgcggcttcctgaagcttttcttccgccatggctctgtccccccgctttgcggcggcaatggcttccattgatgcgcttctgccgttgccgccatgcaggatgatctgaaaaatggtctgttccattttttcattcatgtgtttcactccctttctctacagcacggctttttcgtctctttgtacggctggcgcctgcgattgttcaagttcgttttcttctttcagcttttgcgaatcccacattctgaagaacggatagtacacgataaaggctgtgatgatgttaatcgcctgcatgacagcccctgatatttttccgcccgtggcaagatagccggagaaaatcggcggcatcgtccatgggacggcaatgccggcaggtttggcgacgaggccagtgctcatgccgatataggtaaggaccagtgtgacaagcggtgtgataatgaacggaatgagaagcatcgggttcatgacgatcggcattccgaaaataatcggctcattaatattaaagacggccggcccgatggcgagtttcccaagctgcttcatctgcttgcttcgcgaacggagaaacatggtgaccacgagcgccagtgtcgcgccgcttccgccgatgttgatccagatttcaaaaaactgctgggtgaaaatattcggaagcgcatcgcccgcctgaaacgcaatccggttggcatccatcgctccgaaccagatcggcgccatgacgccgccgactatgttcgccccgtgtaatccgcacgcccacaagagcatttgaaccgcttcggctatcaagcttccgccgagacttcccccaagaatcgagagcggtgtccccagtacaacgcttacaatgttatgaagactttcaaacggcgtcgcttcgacaattaaacgcgcgccccagatcagaaagatgacggcaaagccgggaattaaagcgacaaatgatttgctgaccgccggaggcacgccgtccggcattttgaagacgaaattccgctggatgatcaggcggtaaatttccgtcgacagcatggcgatgatcatcgcaacaaacagccctttgcttcccatgagagacagcgggatgccgccgccgaccatgatttcctctttggcgccggaaggcagaaacggaactttgtacggcgttgccaagagaaacgccgccaaagatatcgcaccggccgataatgcatccaccccgtatttttcggccaggcggtaggcgattccgaaagcggcgacaagacccatgatttcaaaggtcgcatcaaccggatattgcagtttttgagaccaggcgcttccgaacgtttttgccatgaaatccgcatatcccggaatcggcaggttgccgatgatcagaaaaaacgaaccgatgatgataagcggcatggtgaggatgatcccgtcacgcaatgcttgcagatgccgctgggaggcaatttttccggcaatgggcatgactttctcttctaaaaactggttcaccttattcacacggcccgcccctttctacgatgcgtttccgagctgttccgctgatttcagaacctccgctccgttgcatgtgccgtaatggacggtattgatgacttcaaccggcactccttttgattcacccaattttttcagctgcggaagcaaataacggacttgaggcccaagcagcaatacgtccgctttatcaatatgctggttgactgaatcgcctgacaccgcccagattttatattcttttccttgttcctgtgcgcttttttccatcttggtgacgagtaagcttgttgacatccctgctgcacaaacgagtaatatattcatgtaaaagacctcctgaaagtttgatattttgtatgtctcgatgttagtaccatcatattatgaaatcgctttcataactactcaggctttttccgctgttaacggaaaaaaggtgtatcccggtctttctctgatcgtttgtctctgaatactcgtaaaacctcctgataggttgtgcattttaagagacggcttaccgcggccggatcatctaacatgccgccgagccatttgtacatatgctggaggtcggctttgctttctttctcgacgcagagcaggcagacaaattggacacgcttatccgcccagtcaatcggcttcttcagcgtgcataccgcccaaaacgtcgtgtctgtctgcggaacgagcgggtgcggaatcgccgtaagattgccgaaactcgtaggagaaatcgcttccctttcaaaaatagaatcggtcagagaatcagaagcgaggccggcttcagcaacctgctgtccgagaaaacggatgacgtcctccttcgtctccagatcctgctgcaaaaataccagctccggtttcagaaagttcaattgttcccgcttttcttccagcatggcgtcgatttttgtaaaatccccgccgcccaacagcgtatgaacctttaatacgggaacgggcaggtcttttttgatcggaactgtgctgaccacaaaatcaatcgactcaaaggaaagctggtcaaggctgcagtaatcagccgttccgacgatttcaagacgctttgcgaaccgggaacggagcttttctcttaaaagctgtgcgctgccggcgccggacgcacagacaatcaagcagcgtttaggcggccgttccgtctttctcctttcaatggcggctccgaaatgaagcgccaaatatccgatctcattctcatgaatatcaatgccggtttgctccttgatcacgattcccgcaatcactcccgcttcaaatgcgagcggataattttcctttatggcggagagcatcgggtttctcaggttcattccgtaccggtttcggttaatcgccggcttgatgtggagcgcaagacccgctttcagctcattgtcgtccgtgattccgagcttcagctcccgctcaatggcttcgatcatggcctccgtcaaacggctggtttccccgtctatcagccttgtaagctcttttccttccagttgtgactgggtcatgcgctttgtcccgagcaggtgaatggcgatataggcggtttcctgttcgggaaaggtgaccgaaagcgcagattcaagctcttttacgatggcttccgctgactgatattctgtttcaagcttaatatcatgaagatcttccgggatgagagatacatagttttctgtccggattcgtttgcaggcaatggcgatatggatgatgagattgttcaggccgaagaaagaaagcgggatcttatggtttcgaacctgcttcataatggctgtgcggatcacatgaatgtcgtctttcggcagaataccggccttttcactcaggagatcaggctcaggctcgcggtcgtccactaagtattccgccatacaataacggaggcggagctcttcgccgcgcagcttaaagccgtagttcggccttgtttccaaaatgatgtcataggggcggagccgttttttgacttcttttaaatcagattgaagtgtggatttactgatgaacagttcttccgccaagtcatccagcttgaggtagccgtcggccagaagcattcttttcataaggtaatctatccgttcatcgggaaaaatcggcacggtgctgttctgctggaaattgtcctgaagccagtttttaaacggctgttcattccggatcagcagcttatagccgctccctctgacagattgaatggatgcgccgtgtttttctacaatggtttgcagttcctttatgtcattgcggaccgtccgcgtcgttacctttacatttgcagcgatgactgagcttgtaaccggtgtttcagcagctaaaagcaagcgcagaagttcacgaagccgcccatgaagcatgagaaaaacctcctatcagatcagatgcagacgtgaaaaatgggcaaaaagaatgaggaaggggtaaatgtatgtaaattctataatggggaggatttcaagtcaatgcggcaatccgatgccaagcccgtaaaaaaacagccggatcagccggctgttcgggatgcggacatgcggttccgcttagatgccttccgttcttttatgatttttctgatgatcggatagatgacgggcgcccatttgataatcgttttgaaaaattttttcaatgtctgaatcccctttcttttaccttgtctttcccctgttatcagcgtttataaacatggtcagcgtgagacataccggttccctgtcacccaatagcgccacggataatcccgggcttctccgctgttgtcaatcccgattctcgggcctgttgatatatgctcaggcgtaaagccctccgtaatatacagcggcggttccgtgatcatgccgccgtagtcgttcattgaaatgcccatcgccttcgtcagttttcccgggccgtttgtccactctctcgggggtctgcccggtctcctgctctccatcaggaactgtccttcatgaggctccgccgccctgattaacacggcctgcggaatgccgatgtccgcggcgacgacgttcattaatgtatgagtgtgcatgacgtatgtataaatgcggcccgcctcatggaacataatttccgtccgtttcgtgcgccggttgccgaagctgtgcgccgcccggtcttccgctcccatataagcttccgtttccacgataaaacctgaagccgttccctcatccgtctctttcaccaaaagacagccgagcaataaaggggcaagctccactgacggtctctggtaaaattcaatcggcaaaggctttcgttctcccgccatttgcctccctcctttctgaatatagcgatttcctctttcacgtttttcacttcttttttacaatataaacatgagagaaaaaaaggacattattgttgaacgctctattgcgttttgaaaatcggctcggtataatatgatggttcaaatgaaaatgattctcatgttcaataaataccggacaatgatcataaaagtaggtgaattgatttttgagcgattctgtcaggtccgcaaaccgtctgatcagcatcttaaaaaacggggttttcttcctgatcgctgtgatcgggctgcttgtatctatttttttcgccgtctcattcggtgcgaaagacattactttacatacggtttggtcggctgttgctgattacaatccgaatataacgggccagcagatcattcatgaattgcgtcttccgagggtgctcggggcggccgttacaggagccgcttttgccgcagccggcgccctcatgcagggtgtcacgagaaacccgcttgccgattcgggtgtcttaggcgtaaacgcgggcgccatgtttgttgttgcgctcagttttgcttttttccctcatttgtcatacgccctgctgatggtgatgtcatttttgggagcactggcaagcaccggcttgattttctttatcagtgcggcgggaaaaggcagcatgacacctttaaaagtaacgcttgccggggcggtcgtggccgctcttttacattcactcagtaccggtgtggcgatttattacgatttaagccaggatttggccttctggtacgccggcggggtgtcagggatcaagtgggctcatttacaagtccttgttcccgtgattgcggtcttcatcattctcgcgacattcatgggccggtccgtcaccctcctctcaatgggaaatgacgtggcggcgaatttaggggtgaacacggctctgacgcgtgccgccggattaatgatcgccgtcgttcttgccggtgtgtctgtttctgctgccggcgcgatcggcttcgtcgggctggtcatcccccatatcgcgcgaaagatcgtcggcgttacgtacaggctgattattccgatgtccgcgttactcggcgcgattctattgattttggctgacctggcctcacgcacggtcagtcccccgagggaattggcgataggcatcatggtcgcacttgtcggtgtccctttctttctttatattgcccgcaaggaagggagagacttataaatgaaagtgcagaaagaaacaaaaaaagcggcggcggcaggactcattctgctggtcatcgccgtttgcattattctgatcgggctgcatacgggctcattccggctttctcctctcacggtgggaaaaacgctgttcggatacggcacgttccaaagcacaaccgttttattcgattaccggcttccccggattctggtgacgatgctggccggcatcggtttaggagtgtcgggcgctattttgcagggtgtatcccgaaatccgcttgccgatccgggcattctcggactgcatgccggcgcttccttcggtttgatgatgtatatcacgttctttcattccctggaggcgcaggcatcgatgttcatcccgctgtttacgtttgcgggcggaacactcgccgccctgctgatcgtagtgcttacgtacgacaggctgaacggttttttaacgatccgcatgctgttagtcgggatcgccgtttccgcgggcttcagcgccgttacattgtttatgtcgctgcgcctgaatgaagaaacttatacattcgcttcccgctggctggtgggaaacgtctggggcagggattggattcacgtgtggtcgctattgccctggatcggcattctcgcaccgcttgcatggcttaacacccgctctttgaatattttaatgctcggtgaccaggcagccgcggggctcggagcacacgtgcagagaaaaaggatcatgctgatcgccatagcggtcggcttgtcctgcgcgagcgtcgcgatggccgggggaatcggctttatcggctttgccgcccctcacttggcaagacggctcgtcggcaccatgcatcagcatattattccgattgcgggattaatcggacttgtcattcttgtcgcggcagacaccatcggccggtctttgtttcagccgaacgccattccggccggcgtggttgcggcagccatcggcgcgccgtattttctctatctcgtcatgaaaatcaaatcataaaacaaggagtattcccatgaaaaaaataattgcgctcgtcagtttcatgtgtattttcttattggctgcctgccaatccgattcaacacagccggagtcaaaaaagaaatccggcgatcataaaatcgcttcgatgtccattcacctgacaaatgatctgctggctctcggcgttacacctgccggttccgtcgtgggcggagaattaaaagattttctccctcatgtgaaaaatcagctgaaagacacgaaaaaactcggacctgcctcagacccggatatggaagctttacttgagctgaatccagacaacatttatcttgataaagaatttgcgggaaaagatgtgtcaaaatacaagaaaatcggaaacacacacgttttcgaccttgataaaggcacttggcgcgatcatttaaaagatatcggaaaaatcgtcaaccgtgaaaaagaagcgaaaacatttattcaagattacgaagatgaaacaaaacaagtcagatccatgatgaataaggaattagggaaaaacgccaaagtcatggcgatccgcgtgaacgcaaaagagcttcgcgtcttcagcacacgccgtccgatgggaccgattctgtttgacgatctgaagctgaaaccggctgacggcattaaagaaatgaacacctcccgcccttatgaagtcatttctcaagaagtgctgcctgattacaacgcagatgcgattttcgtcgtcgttaacagagacgacaaatcacagcaagcctataaagaattgcaaaaaagcgctgtatggaaagggctgaaggccgtgaaagcaaaccacgtctataaaattgccgatcagccttggctagattattcagcactgggaaataaattagcaatggatgaagcgaaaaaactgttccaaaaataaacacgagccggttttgcaaaaagtgcaaggccggcttttttatattgtcgtttacttatataaacatctgcttatataatagtgtaaaaaaggagtgagcgcatggaacggaggcatcatgctttaagttccgaagggatcagccaatgcctcaaacttctaagcgacccgacgaggcttttgatgctgaagcttctgaaggataaggaatattgtgtctgcgagctgacggctatttttgatataagtcagcccggcatcagccagcacttgcggaaattaaagaacgccggccttgtgcgggaaagacgcgagggtcagtggcggtactatgccattcatccgtccggtccggaatacgcgctggtttgctcgattctgcagcagatagatgaaaaggacgaagttttacagacattgcggcaaaaagaagtcactgttacatgccggtaagggggatatattcttgggagttgcggttttatcagcgctgatttttgtgctgacacttgtgtttgtcatatggcagccgaaacatatatcaatcggctggtctgcctgcggcggggcggtcctcgctttgatcgccggagcagtcagcctgcacgatatcgcggaagtgacgggaatcgtctggaatgcgacacttgcctttatcgccattattatcatttcattgattcttgacagtatcggtttttttgagtgggccgcgctgcatatggccatggcggccaagggcagcgggctgcggatgtttctctatgtgtcggtcttaggggctgttgtctccgccctgtttgccaatgacggagcggcgctcattttgaccccgatcgtactggcgatggtgcgggctttgaatttacctgaaaagctggtttttccttttattatcgccggaggattcatcgccgacaccacctcgctcccgctcgttgtaagcaatttggtcaatattgtatccgccgattactttcatatcggatacattgaatatgcatcacgcatgctggtgcccaaccttttttctctggcggcaagcattttggtgttgtatctctatttcagaaaaaacattccgaaacggtatgacaccggtcttgtgaaacatccggcatccgcaattaaggatgaacgccttttccggttatcgtgggctgtgctggccgttttattgatcggatatttcgtcagcgaactgctgtcgatacccgtttccttcgttgccggctccatcgcggtcatttttctcattctggcgcagcgaagccccgccgtccctgcgaaacaagtcatcaaggacgccccgtgggccatcgtgtttttttctgtcggcatgtatgttgtcgtgtacggcttgcggaatgccggactgacggatcttctttctcagcttatacagaaagcggcggatcacggattgtttgcgggcacactcggaatggggtttatcgcggcgatcctctcctccgttatgaataacctgccgacggtgatgattgacgccatagccatcagcggaacggacactcacgggctgatgagagaagcattgatttacgcgaatgttatcggttcggacctcgggccgaagatcacgccgatcgggtcgctggcgacgttgttatggctccacgtgctgagccggaaaaacgtgaaaatttcctggggaatgtatttcaagacaggtctgatattaaccattccgacgttattcatcaccctgatcggactttatttatggctgttatggctcgcttgagatgaaaaaccttttaagttgaatcttaaaaggtttttttgtgtcaaaaatccgaaaagtgaaactttatattttaaaagtatagacatttagtttcaaaagattataatattcatgaaaacggtttaactttatgaaagaagggattcctcatgaaaagaattttattagcctgcagctcaggcatgtccaccagccttcttgttacgaaaatgcagaattacgcccgctccatcggtgaggaagccgagatttgggcagtcggacaggataaagcaaaagaagcgatgaaagatgcagacgtcgtactgatcggcccgcagatgagttttttaaaaggtgagcttcagaaagaggcggacccgcttcacatcaccgttgatgtgattgatatgatggcatacggcatgggagatggcaaaaaagcatacgaacaggccgttgccttgattgagaacaaataaaggaggcgataagcatggaaacgtacacggatgaacagatcagttttcagctgattcttcacagcggcaatgcccgcagcaatattattcaatcgatacgcgcatataaagacggccggacagatgagtcagacacctttctgacaaaggctgaagaagaactggggaaagcgcacgacatccattttcagatgattcaaaaagaagccggcggcgccaagacggatgtctctctgctttttatgcatgctgaagaccacttaatgtcagcgctttcaatgaaagagctcgtcaaagaaatgctcgacttatttcaatcaaagaatttataaaaagccgggggtgaagacgtgtttgagaaaatcagccaattccttgttccgatcgcgggcaaattaaacaataaccgctacttgcaagtcttacgggatgcttttatgctggcgtttccgctgaccattttcggttcggtgttcgtcgtgctgacgaacctgccgtttttaaacaaaatcatgagcagctccgccctgtctgtctttcaatccggatttggcggcgcttcgacggcgacgatggggattatgtccatttttgtcgtcttcgggatcggctattacctttccaaaagctacgaagtggaggccgtattcggcggagcgatcgcattggtttcttttctgctgctcatcccgttcgttttagagccggaaacgggcaaagcggtcgcaggcgtcattccggttgaccggcttggagcaaaagggatgtttctcggcatgatgaccgcatttttgtcaggtgaaatctacagaagaatcgttcagagaaacttaacgattaagatgcctgccggtgttcctccggctgttgctaaatcgttcgccgcattgattccggcttttatcacgcttaccgtcttcctcttgatcaatgcggctgtcacccagatctttcacaccaatctgcatgatgtcatctatcatacggttcaagccccgcttgtcggacttggaagcggcatcattcctacattaatcgctgttttctttattcagattttatggtttttcggacttcacggacaaatcattatcaattccgtgatggacccgatttggaatacattacaggtcgaaaatttagctgcgtatacagcgggaaaagagattccccatattatttctaagccgtttatggagatttacaccgtcggaatgggcggaaccggaatgacattggccatagtgatcgccatcttgctttttatgaaaagccaacagatgaaacagatatccaaactcggtctcgcgccgggcattttcaacgtcaatgagccggttattttcggtttgccgatcgtgatgaacccgatcattatcattccgtgggtgatcgcgccgatggttgtcacccttgtcacctacctggccatgtcggcggggatcgtgccccctcctaccggcgtgaccgtgccttggaccgtcccccttttcattaacgggattatggcgaccaattccgtcatgggcggcattatgcagctggtcaacctctgtattgtgtttgtcatctggttcccgtttcttaaagcgctggacaaattaaacatggcaaaggaaaaagaagctgagaccgagcagcatgcccgggatgacagcatgagtatgtaatcaaaatcgcagtaagggagagaaatcaattgactgaatcaaatattcaatatcgttttccggaaggattctggtgggggtcttccgcctccgccacccaaacagaaggcgccgctgacagagacggaaaaagccaaaacatatgggattactggtatgaaaaagagccgagccgtttttttaacggcgtcggccccggcgacacgtcacgtttttacgatcaatacaaggaggatatccggctgatgaaagaaatcggccataactccttccggctgtctatttcctggtcaagattgattccggacggaactggcgaggtcaatcagaaagcggtcgcgttttatcaggacgtcatcgatgaaatgcttgcccatcgcattgagccgtttgtcaatttgtttcactttgacatgccgctcgcccttcagcgtaaggggggctgggtcagccgggacaccgttgacgcgtttgaacattacgccaaaacctgcttttcgctattcggtgacaaggtgaaaaaatggttcactcacaacgagccgattgtgccgattgaaggcggctacttatacgactttcactacccgaatcacgttaattttcaagaagcagtgcaggccggtttccataccctgctgtcgaatgcaagggctgtcaaagcctacagagaattgaaacaggacggacaaatcggaatcattctgaatttgacgccttcttatccgagaagctcacatcctgaagatgtcaaagcgtcccggattgccgacgcctttttcaaccgctcatttttagatcccgccgtaaagggcgaatttcctgaggagcttgtcgagattctcaaggcggaaggctttctgccgcgttatgagaaagaagatctccgcctcattcaggagcatacggtcgacctgttaggcgtgaactactaccagccgaggcgcgtcaaggcaaaagaacatgttccgaatccgcatgcccctttcctgcctgagcgtttcttcgacccgtatgtcatgcccggccggaaaatgaaccctcaccgcgggtgggaaatttacgaaaaaggaatctatgacattctcaccaatctcagagaacattacggaaatatcgagtgttttatttctgagaacggcatgggagtagaaggcgaggaacgcttccgcgatgaaaacggcatcattcaggatgattacaggattgaatttatccaggaacatctcaaatgggtgcatcgggccatcggagaaggttcaaatgtaaaaggctatcacctgtggactttcatggacaactggtcttggacaaatgcttataaaaaccgctacggctttgtatctgtcaatctggaaaacgggggcgaacggaccgtcaaaaaaagcggccgctggttcaaagccgtttccgatcaaaacggattttaacagatgaggagggacggccatgcttggaggtattgaagccggcggcacgaaatttgtctgtgccgccggacaaagagacggcaccattctggacagagcggagtttccgacgggagaaccggatgacacactcagacaggtgatccgttactttaaagatttcccgatagaagccatcggcatcgggtcgttcggaccgattgatatccgtcccgacagtcaaacatacgggtgcatcaccgcgacgccaaagacagcctggcagaactgccctattcttcaaacgatcaaaagcgctctggatattcccgcaggcttcaccaccgacgttaatgcggcggcgcttggagaagcttctttcggcgcggccaaaaacgcggaaagctgcctctatttgacggtcggcacaggcatcggcgcgggcgccatcatgaacggcagatttgttcaagggctgtctcatcctgaaatgggccacatttatgtcagaagacatccggacgacggctacaaaggcaattgtccttaccatacagattgtctggaaggccttgcggcaggccccgccattgagaaacgctgggggaaaaaagcatttctgctcacggatcagcaggaagtgtgggagcttgagggctattatattgccgaagcgcttgtgcagtatattctcatactttcgccggaaaagatcattctcggcgggggcgtcatgaagcagcatcagctgttctcttctatccgtcagcacgtgaaaaagcggctgaatcaatatattgatctgcccgatattgaaaaatatatcgttccccctcaattagggattcactccggcgcggccggttcgctcgtattggcggagcaggccttagaagcggcaaaccgggaggcggaaaaatgacgaaactcttatttttggaaccggtttttaaagaaagattatggggcgggacgaagctgcgcgatacattcgggtatgagattccttctgagcggacgggagagtgctgggcgatttcagctcatccgcacggcacatccattgtgcggaacgggcctttttccggaacatcattacagcgtctctggagtgaacaccctgacctgttcggacatccgaaagaagacgcttttcccctgctcacaaaaattcttgacgcaaatatggacttatccgtacaggttcatccggatgatgcatatgcacatcggcatgaaaacggagaactcggaaaaacggaatgctggtacgtgttggactgcaaaaaagacgcggagctcattttagggcatcgcgcccaaacgagagaaggcttcgttcggctcattgaacaaaacgagtgggatcacctgctccgccgcatccccattaagcccggcgattttttctatgtcccgagcggcacactgcacgctttatgtgaaggtacgctcgttcttgaaatccagcaaagctctgatgccacctaccggctttacgactatgaccggacggatgggaacgggaataaacgcgagcttcatcttcagaaagcaattgacgtaacagacattccccataccgatgaaaatgtaaaaagcacaaagcatcggatcggagatgctctgattacgatactcgccgaaacacctttcttttcagtttatcaatgggatgtgagcgggaaagcatcattccccgcacccggccggtatttactcgcaagcgtcattaacggacgcggagaactggatggatgccccattcacaaaggcgatcactttatcgtgccggcggattccggagattttgttatagaaggagattgtgaggttatcgtttcacatccttcatcatcttaaaaatcaggaggtcttttatatgctcaaaaagttagcagcctgcctgtctatcgttttattactcttaggagccgccagtccgatatcggctcacaccgtttatcccgtcaacccaaatgcccagcagacgacaaaagatatcatgaactggctggctcacctgcccaaccgttcagaaaacagggtcatgtccggggcgttcggcgggtacagcgatgtcactttttcaatgacagaggaaaaccgcttgaaaaacgcgacgggacagtctcccgccatctacggctgtgactatgggagaggatggcttgaaacagcggatatcaccgattctatcgattacagctgtaacagcagcttaatctcatactggaaaagcggcggcctccctcaggtcagcctgcatctcgcaaatccggcttttccatccggaaactataaaacagccatctcaaacagccagtacaaaaacattctggacccttcaactgttgaaggaaaacggcttgaggcgctgctcagcaaaatcgccgacggccttactcagctgaaaaatcaaggcgtcaccgttctgttcagaccgctgcatgaaatgaacggcgagtggttctggtgggggctgacaggctacaaccaaaaagacacggaaagaatctcgctgtacaaagagctttacaagaagatataccgctatatgacagagacaagagggttggataaccttttgtgggtgtattcgccggatgccaacagagactttaaaacagacttctacccaggctcatcttatgtggatattaccggtctggacgcttacttcactgatccgtatgcgatatcaggctatgatgaaatgctgtctctgaaaaaaccgtttgcctttgccgaaaccggtccgtccggcaatatcggaagctttgattatgctgcttttatcaatgcgatcaggcaaaaatatcctgagaccacgtactttttgacatgggatgaacaattaagtccggcggccaatcaaggcgcgcaaagcctttatcaaaacagctggacactgaacaagggcgaaatatggaacggcgggtccttgacgccgatcgcggaataaccgcttcttttgaaaatcggttttaaaaaacggctctgctgggcatattgttaccgttcaaaaaggagggttcaacaatggaaaataacaaaaacagcgaagaaacgctttccagtaagacgaccggtaaaggcgagtcagaagacacgctgacaaaccggcagggccatccggtcactgacaaccagaatgtcaggacagtcggcaatagaggaccgacgacattggagaattatgattttttggagaaaatcagccactttgaccgcgaacggattcccgagcgcgtcgttcacgcgcgcggcgccggcgcacacggatactttgaggcgtacggaagttttggagacgaggagatttctaaatacacaagagcgaaagtgtttcaaaagaaaggaacgaaaactccggcgtttgtgcggttttctaccgtcaaccacggaaagcattccccggaaacattgcgtgatccccggggttttgccgttaagctttataccgaagacggcaactgggatctggtcggcaacaacttgaaaatcttttttattcgtgatccgctgaagttcccggatcttgtgcacgcatttcagcctgatcccgttacgaacattcaggacggcgagcgtattttcgacttcatttcccaatcaccggaagcgactcatatgatcactttcttgttttcgccgtggggcatcccggccaactaccggcagatgcagggctcaggcgtccatgcctacaaatgggtcaatgaagaaggaaaagccgtgctcgtcaaatatcactttgaaccgaaacagggcatccgcaacctgacacagaaggaagcggaagagattcaggggaaaaactttaaccatgcgacacaggatttgtatgaagcgattgaaaaaggcgattaccctgaatgggaagtgtatgcgcaaatcatgactgatgacgaacaccccgagctggattttgatccgcttgatccgaccaagctgtggtataaagacgatttcccttggaagccgatcggtaaattggttctgaacaaaaacccggaaaactaccatgccgaggtggaacaagcgtcattcggaacgggcgtgcttgtggacggccttgatttttcggatgacaaattacttcaggggcggacattctcctattcagatacccagcggtaccgcgtcggcgcaaactacctgcagcttccgatcaactcgccgaaaaagcatgtcgccaccaaccaggaaggcgggcaaatgcagtatcgggtcgatcgggcagaaggacaaaacccgcacgtcaactatgagccgtccattatgggaggactcaacgaagcaaagcaggatgggaaagaccatacacctcatgtcgaaggcgatgtgaagcgggaagcgatcgaccggtcgaataatttcggccaggccggaaaaacataccgtcgattttcggaatttgaacggaacgaattgatcacaaacctggtcaatacgctttcttcctgccgcaaagacattcaggatcaaatgattgagaatttcacaaaagcagatccggactacggaaaacgtgtggcggaagggctgaaaaaagcctccgaaagcaacagcggcgggccgatcggcactactgatacggcacaagccgcaaaacaggctgaacaggaaagccatccgtctgatccgtattaaataaaaaaacaggacaatcgcgtcctgttttttttgagctaattcagctcctgtatattctgctccgccgcggccgcaaatactttcggctccggacggtcaagatcttcatggaataaacttactttgtgaatctgccggttgtcgtacagatgaaagtagtagttcccggtgtcacagcacatgaccgacgtatactgcgtataatcaatttcattctcctctgtgatcaccgcgccttttggaatattcacattggacagcacgtgaaaagcggccgtaacgccatccgtttcatgagcggcaggctctaaatgctctttcagataagcggctctgatgaatcgggatggcggcgtgtaatcaccgggaagcccgatcgttccagatccttggccgaaagcggttaatgtcattccgcccaatgttttgctttctgactgctgcggcctgattccgatataatggcgcagattggtcacatgccaaggaaattccggactgttggtcatcactccgggtttgttgtcatatactttcattccctccgatgtcggctcgatgacaatgcagccgcccgtgcggtctgataaaatccaatgaagaggcagcaccgtatccaataacattaacttcttctctacaatcgtcagcattgagagcttttcctttatgtcttcaagagattcacagtttgataaggcccaggtgacaaactcatgaggagcgatgtgacaggtgccctcccgttccgctttctcgtatcccgcaaagcccggaaaatacagcgtcgcacacgacagccctttttcatttacgccgtcggcaaacagaacattgccgagatttctccccatgccgataaatgcgtatttcgtcttatgcatcctgccgtcagcttcgcttttccagctgtactgacgagggtaaagcacgacgtccgtaccgagctgaaatgcaaaatccatcgttcgcgccaataggtgattaccgtctgtcgttttcaatgtaagacttgtacacatatcatcaatcccctttttattaatgaaatttacacaaagtaaactattcttccagcttaacgaataatggctccattcgtcaaaagattgacacatttctccttaatacatattagtccgtaagcatatccatgccttttaaaccctggcaaatcgttttggcggcagtgtttgttccgtttttcaaaaaaacttttggacggctgtcaacgaggctttacattgtttttcctgcatgctggaatttgtaaacggcaggtcaatctgttaagctatgtctttatgttaaagaagaacatacggaggagattatctattgaaagtagaaaggcgaacgattgaacatattccgcatgacgaaagacacggaaaggctaaagatttattccccgtctggttcggggctaatatgcatattacgacgttagtcacaggcacactgcccgttacaatgggactcgatctcttttggagtatcgccgccattattatcgggacctttatcggcgcaatctttatggcgtctcattccgcacaaggacctcagctcggaattccgcaaatgattcaaagccgcgcgcaattcggcgtgatcggagcgattctgcccctctttttggtcatgtttatctacctgggcttctttgcgagcagtacgattctcgcagccggtacactgagcagctttgtaccgattccggcttcatggtgtattatcggcttaagcgccatctgttttttactcacgatctacggtcatgatctgattcacaaaatgcagaaaatcctctcttggacctcctttgccgttttttttgctgcaacgattcttatttttcaactgccgattccttcgggaagctgggtgcccggctcattagacctgcctgttttcctagtggcggtcagcgcggtggccacatggcagctggcatatgcaccatatgtcgcagattattcccgttatctgccggtcaaaacaccggcatcgcatactttttggtacagctacgcaggtacgtcagtcagttccatctggatgatgcttctcggcgccattttgacgacggcgctcccggaatttaccgctaatgcgggaaatgagattgtccgattgttcggtccgttttcctttattatgctgatcatcgtcctgttcggtcaaatggcgatcaacgtctttaatttatacggagcctttatgtcaacgacgactaccttagagccgtttttaaaactgaaggtgacgccgaaaacgagagtggtaatgatcctttgtgtgacggcagcaggtactgtattaagtctcttgggccaaagcaatttcatggaactgtttttaaatttcatctttttcatcagttatttcttaattccatggacggcgatcaacctcgtggattactattttatccgccgcggaaaataccacgtcaaatcgatgtttgacgtcaacggacaatacggcagggtcaattggattacagcggccgccttcgttttgtcgattatattagaaatcccattcatcaatacatccttttacatcgggccgctcgctgaaatattcggcggaggcgacattgcctgggtcatcggcctggccgttccgtcgctgctgtattatgtcctgatgaaatcaagggtaaaacaacaagaggcgccttctctatgaagacgccttttctttattcatattccttccatacacgcggcagcagttcagaaagttcgtgtgccaataaggtatgggcggagcgctctttcgtccataactccgcacattcaccgtgaatgcggacggcgttcaatacggcatgcttcgggtcttgatgacagcacagcatgccgagaatcattcccgtcagcgtgtcgccggtcccgccttttgcaagcgcgccgtttcctgttgtattcctgcggcattccccgtcgggaaaagcgataatggtttcgtttcctttcaggacaatcgtggcatgaagccgctccgcccattccgcggcatatcccgctctgttctgctgaatctcttgaatcggaaggcctgtcattctggaaaattcgccgggatgaggcgtcaagatcacgggggctttcctctttggataggttcttttcgttatggcgcccgcatccagtatgacgggataatcggcagaaagcagctgatcagccgcctgctgcacttcgtctgtttgaggaaggcccggcccgatggcagcggcccggatggtttccccgggctggcccgccgcggcttttttccagccgtcacgccagtacgtcgcttccggcagcaccgggacgataagcgggatgacgcctgccgatgtaccgatgacgagcttgccgacaccgcttctcatcgcgcccaatccggccagaagggcggctcccggcatgtcttcgctgccggccagcaataacgccgtcccgaacgtccccttatggctgtctgcctcccgcttcggcagcgtatctttcacatcctgttccgtccaatccattatattcatctctgtacctcctcttctgtctcctatttatattccaaacaagaagagattttaaaccgcaaaaaaaaacagccgctcgcttgcggctgtttatgttctgatcggaacatcaagacggtaaagcttccggtaccgttcgttttctgcaagcagctcttgatgggttccttccatttctgcttttccattttctaaaaagacgattttatcagctgtttccacacccgctaaatggtgtgtaatccagagaatcgttttctctttaaagacatcaaaaatcgtatcaagcaattcgcgttcagtgaccgcatcaaggccgaccgtcggttcatcaaggataatgaccggcgtgtcttggagaagaatacgggcaagcgcgatccgctgccgttccccgcctgagaaacgaatccccgtctcctgcacggacgtttcatatccgtcaggcagtgattcaatataatcatgcagcttcacttgccgagccgcacgcttaacatcttcatcactcgccttgccgtttccgagccggatattgttcataatgctcgtgttaaagagatgaggtttctgattcaaaacggccaccgctgaggaaatctgctcctgcacggccgcagtttccagcccattcagcatcactttgcccgaatcgggaactaaggcgccttcaattaaagcgagagaggtcgacttaccggagccgctcctgccgagcagcgccattttttcaccttggcggagagtgaaggaaaaacggtcaagcacatgactgtgctgatcataagaaaacgtcacgttatcaaatgtaagtgtcacatcagatacatccagtttctcatctgtctgcttcacctcacgacttcgcagctccggagccgcctgactcattctattgatggaatcctgataagaaggcacttccgtcagcgcatccgaaaggggcagaaacgcctctgtcaatggaaatacgacaagcacaaaggccgcgatcatcgtgttggcgatgctgccgtccgcatactgacccgccgtccagaacagcatgatcaatatgaagccgccgacaagacattgcgcggcgagatcacgccatctcgtaaaccgctgacgtttgctttcaagatcaaaccatgccttctctttctcttcataagaggaaataaaggccgcctggcgtcccgagaacatccagtcgctcacgccgagcacggcatctgtcagccggctgtagagcgtattccggccgcttttcagcctcatgtttttcgctctcgtcacaagaagcgacacaaccggaaacaatacaaccaatataaacaggtaaatcgccgcaaaagcggcaaacggccaggaaaaaaagccgagtccgataacggatgccgcatacagcagcaaagcggaaaccgcagggaaaatcgtttttaaaaacgcatcctgcaaatgctcaatatcctcagccaaaatgccgagcatgtcgcccgtccgaaaacgggatgaaagcatgagcgaggccggctccagcatattgtaaagccgcaccctcatgtcggacacgattttcaaaatgatatggtgccccgtcagacgctcggcgtaccgtgagactgaacgggcaatcccgaaggtccgcacggccacaatcggaacgtacaccagcaggatattctcaggcctagtcgccgacttagagatcaaaaaaccggaagtgaacatgagaaaggccgccgaaaaaatcgtcaccgcgcctaaaaaaatcacaagaacaaacaaacgggcattttgcttcatatacggcagaatccattcttcttttctcatgttctttcccccagttgcgcctttacaagtttggcgtatacgccttgtttctccatcaattcgtcgtgggtgccgatttccgccaccgcgccgtcatcaagcacgataatttcgtccatctcaagcatccagtgaagacggtgagtggccagaaaaacaagtttgttttcaaacaggtctttcatcgtttcttttatttcatattctgtttcaatatcaaggtgagcggtcggctcatccaaaaggagaatcggccggtttcctaaaaaggctctggccagcgcgacacgctgagcctgccctccgctgagcgcccgtccgccctcgccgatccggccgtcaaggccgccgggcagatcacggatcagtccggaaagacccgccgatctagcggcctgcgccgtttcctcacgcgaagcatcaggatgataaaaccggatattattcaaaagcgtgtcatcaaaaatatacgggtgctgcggaatataaagcagctgcttctgccagccgtccgactgcagatgcgagcgggattcaccgtttaccttgatctcaccggacgcaggctctaaaaagccgcccagcacatcaatgagtgtcgattttcccgcaccgctttccccgataatcccgattttcttcttccctttgaaggacagatgaaattcagacatcgattctcggacggacaaacgcgcaagctgtaattcatccccgtcagtccacgtatcaagttcgagcggcttttcttctttaaaaccgggctgcgccaaaatcgcttgaatggttttccccgcctcctgcccgtttaacgtcgcgtggtaatcatttcccacttcgcggaccgggagaaaatattcaggtgcgagaatgagcgcggtcagtgccggtccgagcagaatttgtccgtctatcagccgcaagccgagaaacaccgccactgtcgccaccgacagcatcgtaaagaaatccagggcgaatgatgataaaaacgcgacccggagcgtgctcatcgtcgccttgcggtatctctcactgacatgaaagatgtttttactgtgtgatttgcttaatcctaaaaaccgcaatgtctccagtccgcggagcgaatccacgaaatgattggaaagcgtctgataggacttccattggcgatcggcttttttctgtgcgacaagtccgagcagaatcataaatacaatcaaaatcggaagcgcaagaatcagaatcaatgccgatgttttatcctgaaaaaacacgtaaatgacaacggcagccggcacaatcgccatgctgaccattttcggcagaaacagctctaaataacggcggaactggctgatgccttccatcgccagcgtcaccatccggcctgtcccctcttttttcgcaaagcgggggccgagacggaacaattgctcaagaaatctttttcttaagtctgcgccggtttgcgcggcatattggtacacgattttctgccggaccgctgtcaccgcatgccggaccaaaaacgcaagcaggaaaaagccgataaccggataaagagaagcaatccgcttcccgttaaataatccggttaccgcctggctcagccattccgcctgcaagatgatggcggccgtttgtataatcgttaatcccgtaatgatcgcaagaatccgcttcattcctttataaagaaacaggtcttttcccattaataagtcataggctccttatggctgacgcgtttccggaagacataatagctccagatctgactgccgatgacaaacggcagcagagtcagtgcggcaattgtcatgaccttaagtgaataatcaccggaagacgcgttagctactgttaagtcatacgcgcttttcagcgagctgaccatgacgcgcgggaacagagagataaaaatcatcgcaactgtcaaagcaagacccgcgccggtcataccgaatgcccagccgtcttttttcttgctcatgaacacaacggcaagaacgttgcagatgacaatcagcacgaataccggaatcgtgatgtttgcccggcgtgtaaacatatccgtatcgtatgcagacatcgcaaagaaagcaagtacaacaagaaagataacaccgattacgcgttttgccatttttctcgcacgctcttgtaaatcaccgatcgtgcgcagggtgataaacattaaaccgtgcaggaatgaaagaagggtgacggccgctccgccaagaacggaatacacgttcacaatatctgaaaaacctgcgtgaatgttcatatgtccgtcaatcggcatgccgcggaacaagcttgtgaaaataagtccgaatacaaatggcgggataaggctgccgaagaaaatcacccagtcccatgttttgacccattttaaatgattcacttttccgcggaattcaaacgccacgccgcggcccattaaagcaagaaggatgatgataaacggaatataatatccgctcagcatcgtcgcataccagttcgggaatgccgcgaagatcgctcccgtacctgtcagcagccatacctcattcgcatcccagaacgggccgatggtgttaatcagcactctgcgttctaattcattatggccaagaaatcgggtcgaaatgccgacaccgaagtcaaaaccttctaaaaagaaaaatccgacaaacaaaactgaaacgagtacaaaccaaagatcatgaagtgaccccatggtaaacctcctgactgaacggatccgttgatacaggaacatccttatgatcatcatggtccgcaccttttttaatttcacgaacgaataggaagacaagcagcgcgcctaaaatcagatacatgacgccgaagccgataattgaaaacagcagagatcccgtcgttacgttaggcgaaacggattgtgcggtcgtcatttgtcccatgaccgtccacggctggcggccgatttcagtcataatccaaccggcagagttcgcaatgaacgggaatgcgatcagcgcgatcatgccccgtaaataccacttgctcgtatgaagctttttgcggcggttcagaataaagccggcaatcgcggcaaaaatcataagcgcgcccgctcccgccataatgcggaaactccagaacgtcgttttaacaggcgggatatagtcgccttttccgtacgttttttcatattctttttgaagtgttttcatccctttcacactgccgctgaacttctggtaagccaagtagctgagtgcgtaaggaattgaaatttctgatgtgtttttttctttattcgtatcaatattcgcaaaagccgtccacgcggcaggatcaccgctgtcatcccaaagcgcttcactggcagccattttcatcggctgcgattccattaaatgctcagcctgcatatgtccgctgaacgcaacgccgataccggcgatcagaccgacaatcatcgaaagcttgaaagatttatggaagaaaggcacttcttttttcttcaataatttaaatgcgctgacaccggcaataaagaaagcacccgtcgcaagcgccccgaaaatgacgtgagggaattcaacccaaagctgagggtttgtcaaaagcgccccgaaatcattcatttccgcgcggccgtttttaatcgcaaagccgaccggctcctgcatgaatgagtttgccgtcaaaatccagaaagatgacataatcgttccgaaagatacaagccaaatgcaaagcaaatgcacttttttagataaacggtcccagccgaaaatccataatccgataaaaatagactccataaaaaacgccaaaagcgcttcaatcgcaagcggagccccaaatacgtctccgacaaaacgggaataatcagaccagttcaatccgaactggaattcctgaagaatccctgtgacgacgccgacagcgaagttaattaaaaagagatgcccccaaaatttagccattttgagataggtctcttgttttttgacaacataaagcgtctccatcaaagcaaccataaacacaagcccgatagacaaaggcacaaacaagaagtgaaacaatgttgtagatgcaaattgaatgcgggctaataccaactcactcatgatgtttttcctccaatctggtaaattgctcaacatttcacaaacatagcgaaatcattgctcggcatttcacaaaaaatgatatatttgctcaatgtttcacaaattcgtcaaaactattgaaatatcagcctgtacaccctgggggacagcggctgtcatagaaatgattcaatatcattactttacaacgattcagcctaaaaaaaaagatcaatatacctaaaataaggctgaaattgtgaccgattattgtcggatttgtagagattttatgtcagcacctaggatatttgtccctttgatatcgtacctcttttttattcgtgtggcgaacaaaatgcttttctcggtgaaaaagcccgccaaatcgccattttgagaaagaaaatgtgaagaaagcatgccccctagtaaattcataatatatgaacaatttaaattttttagtatactttaaatggggatattttttcactacataacgactgggggaacaagcatgggagaacttcaaccaaaattgcaaacggattcaatccaaaaacaggaacggactgataactggtttgccagagcaatgaatataagaatcggcattattcctcttcctatctatatcctgcttttcttgcttattacggtgtttgtcatgagccgtgatgttaaaagcgacattctgacatcaattgccgtcatgagttttttcggatttaccttcggccagatcggaaaatccattccgattgtgcgttccatcggcggccctgcgattctcgcaacctttattccatccgctgtcgtctactaccacctgcttccgaaagacattattacttcaacaacagaattcacagaaagctccaactttctctatttatttattgccggtatcgtcgtcggcagtattcttgggatgaaaagagagacgctcgtcaaagctttcgtcaagatttttattccgctgatcgccggctcgatcgcggccgccatcgtcggcttatgcgtcgggacgcttctcgggctcggctttcagcacacactgctttatattgtcgttccgattatggcggggggtgtcggtgaaggcgcgattcctttatccatcggctactccgatattatgccgatgtcccagggagacgcctttgcgcttgtgctgccgtccatcatgctcggcagcctgtgcgccattatgttatcgggtttgctgaatgtcatcgggaaacgcaaaccggaatggacgggcaacgggaaggttgataagtctgatcattccgctcccgcattggaacagccggccaatgataaaacgtttgatttgtcctttttcgcttcgggcggtattttagcggtttccctctatttggtcggcatgctggcgcatgatttctttcagcttccggctcctgtcgtgatgctcgtccttgccgttctcattaagctgttcaggctggcgccggcttcgattgaaaacggagccttcggcgtctcgcgctttttctcgacagccgtgacctatccgctcttatttgcgatcggcgtttcaatgacaccatgggacaagctgattgcggcatttacgatcagcaacatcattaccattttatcaatcgtcgtcacgatgatggccgtcggttttctgatcggaaaatggctgaatctgtacccgattgagacggcgattattaatgcctgccattccggccagggcggcaccggcgacgtcgcgatcttgagcgccgctgaacggcttgagcttatgccgttcgcccaagtgtcgaccagaatcggcggagcgattaccgtgagtgtcacccttctgctgcttcatcaattctattaaactgaaaaaaagcctccgcatatgcggaggctttttatttcatcacattttgaatataagagccgaatgccgcgccggacatgcccggcgacacacggacgcggtgaagcccgtaaagcccctgatctcttgacgccgctcccggctccgtcgtaaccgccatacggtagcctgacgcggcggcggcttttaatgttttcttattatatcgtccgacagggtagctgatcatagacgtccgctgcccgaacatttgatcaaataaacgcttagagtccttcatttcacgtcgctgctgctgcggtgtgagcccgttcaattcgagatggttcatcgtatggctctgaatggaaatgccgtgggcggccatctccttcatctgcttctcagtcagatgattcttatgcccgatatagtttccgatcataaagattgtcgctttcatcttgtatttctttaaaatgggataggccgctttcacattgtcggtatagccgtcatcaaatgtgatcagcacacatttttcacgcggctccttatcctccgtcagcatcagataggcctcttcaggagtcatcgtataatagccgtgatcatgaagccacttcatatgctgccggaattcttccttcggcacacgcaggctgtttccctcagaaatgctgtggtacatcagaatcggcagtcttgccgttcctttcgtttgaacccaggcggacgtatccggctcttttttgatttggcgctttacagactttttatcgtggtgcgcttctgccttcggaatgctttgttcggcgcttgcctcatggcccgagcaggcggcaagcgtaaacacggcagccaaaaggcacatgcacatgatcatgcgtttcatcgttttcctgctttctgtcttctatttactttttatatcggttatgcgtcataaattgttacatcaaaaaagccggacatccagctgtccggctttgcgttatgagcggattctgatttctgtttcactgtcaaaaaagtgagctttattcatgtcgaaagcgacggtcaattcttcaccggcatgaatgtcatggcgggcgtcaatccgggcgataaaatcctgatccccgatccgggaataaaccataatttctgacccgagcaattccgcgacattgattttagctgtgatggatgacttcttataggattctaccacaatcagctcatcatgtatgtcttccgggcggatgccgaagataacatctttgccggcataccctttttcccggagcattttcattttcccttccggcacgctgagagcggctgaaccgatctgaatggcgccgtccgtcagctttcctttgaaaaagttcatcgctggggagccgataaacccgccgacaaatacgttttcgggatgttcatacacgtctttcggtgtgccgatctgctgaatttttccgtccttcatgactacgatgcgtgtcgccatcgtcagtgcttctgtttggtcgtgcgtcacatagattgtggttgtttgcagcctttggtggagcttaataatttctgcccgcatctgcacccgaagctttgcgtccagatttgacagcggctcatccattaagaacactttggcgtccctgacaatcgcccggcctaatgcaacccgctgccgctgcccgccggagagcgccttcggtttgcggtgcagatactctgtgagcccaagcattttcgccgcttcttcgacccgtttttttatctcaggtttcggcatcttcctcagcttcagaccgaaagcgatattatcatagaccgtcatgtgcggatataacgcatagttttgaaacaccatggcgatatccctgtctttaggagcgatatcattcactctcgtgtcaccgatatagaaatcgcccttcgtaatgtcttccagcccggcaaccatccgcaatgttgtcgacttgccgcaccccgacggaccgacaaacacgataaactctttatcttgaatatgaaggttaaaatcatcgacagccgcttctttttgatcgtaatacttataaatatgctccagccgaagttccgccatgtcatctcctcctttttgtaaacgctttcttaaataggattgtaacagcgtcacacggcggcggttataggcaatgttcataaaaaaagtccgctgccttcgtgcacatttcccatttaatgtgatttttcatactgcagacaaatgaaataagccaacagggcgccccgatatgtcttaatatcaatacccgagcgttccgcaaatttatcaatccgatattgaagactgttgcggtgcaaatgcagtcttttcgatgtaagcgacatgttcgagttatgttcaataaaagtctgaatcgtatgcttcagctccggttctttctgaaacagcagcaccgcttcttcgtgaagcaaggctgagagcttttctctgctttcttccgtgagcatggccggaaataccgtttccgcggtcagcgtgctcagctgcgggagataacgccggccaatctgacaatattgctgttctctccgataatgaaggcgcagacgttctcccgcgccgtaataccttccgatgaaaaaacggacactgaaataaaaatcgccttcgagaatcttcacaaaagatgcgatgtcatccgaatctggcgcttccagcttttcttcctccacaatcacgccctgatcccttcccgtccggacaactgtatatgaaaccggccagaaatggcgcagcgcttcggtaaatgccccccagtcccgttctcccaataagtcataatggataaaacggacacgcggctccttgacatcaggcaccgggccttcttccagcagaaaacgccgccacctctttgctgccgccgtctccggaaaaaaatcgcctttttcttcagcgggcgtcaaaagtgattccagaagcagtttctccttcggggtgatatcctccttcggaatggcgacatagacccgccttttctcatcataaaagcaaaagacatcctccgccgtacagcacgtatcagacaacacagccctcgggtaaattgccaataacgggttcatatgcgctcctctctatcgctctatcatattttcagtataaaacgtccggccgattgtatccacttcgttttaagaaacagctttcaggctatttcccgggaaacggatcataaccgcttctgccggcataagaaaaaaaccctccgcgccggcagagggttcctttttatttagagatatcgacgaagccttcaccaaagacgtcacgcacatcatgaacaatgacaaacgcttttgtatcacagcttttaataatttttttgagcatggaaagctcttgtttctggatgacgatatataaaatttccttcgactgccccgtgtaatttcctttacccgacagcagcgtaacccctctgtccataagcgtgttgacctgttcggcgatttcgtgcttatgctcagatataatcgtcaccgcttttttcgtattcaggccttcaatgataaagtccatcaccttcgttccgatgtacagcatgacaacggtaaacatcattttttctgcaccgatgatgaaataagaactgaagacgacaatcagatcaaagaacaaaagcgcatagctgatattccaatcgagatatttgttcgcaatcctcgccaaaatggcagaacccgcagtcgtgcctccgactcgaataatgatcccgattccgacaccggcaaacacacccgcaaaaatagtattaataatgagttcatgtgaaggcgagtgccaatcatgcgtcagatgcagaaacagtgagttggcgacaacggtaatgatcgtataaagcgttgtttttccgtctaaaaatttatatccgataatcaataagatcccgttcaaaatgatattcgtcaccccgggcgaccattcaaacacatagtacaagatcagggtgattcccgttaccccgccctctccaagatcattcggaatggcgaataaattaacggccaaagcaaagataaaagccccaataatcagcatcagcacatccagcaatctctttttcatcccagacactccctttatataaaatcaaaaaagcccgggagagcactcttcattaaaagagcagaaactcccgggcttttatcccaacgtgtcacagcaggaacctgctgtgtgttttctctcggtccagaccaattcagcattgcggaaccctagaaaaccactgttttttatgttcagtttttgtatatctttcaagattatacgggaaatcacgaacatgttcaaccactcttttttcaataaacgtataaaaaatatgagcgatctgccgatactaaaaaaggcactaaaatacatgactaaaaaatcattaaaatactttttttctcaaaatattattgactgtaggttattttacaggcattatagtatgtagttttcaagaaatagtttacataggaggaaatattatggcaggcaacctggtgtcttgtaaggcatgcggcaaagaaatcgctaaaggcgttaaaaaatgcccaaactgcggtaaagatcagagaaacttttttatgagacataaaattatcacattgcttctggcagtagtggttattatcattctcgtaaacatcggcggcggaggcggatcttcatcatctaaaaccgcgtcttcaaaagctgcggaatccaaggaaaaactgtataacatcggtgacactgttaagactgagaaaactgaagttactgttacgaaagtggaaaaaagagattcagtaggctctcaatttgtcgagaaaaaagcgtctgacggcggcgttatcgtagctgttcaatacacagttaaaaatgtttcaaacaagccgttaagctctttctccattccaagagcgaaattagtagattctaaaggaacatcctatgattcagatattgatgcttcttcaagctatgcaacagaaacaaaagtagacaacagtaaaattttaagtgacttgaacccgaacattaaagttacggacgtaaaagcttttgaagttgataaaaacgcatactctaaaggcacttggaaattaaagttcagcaacgatgttgaagtgaaaattaaataatgaccgtaataaaagagaccttcaccatttgaaggtctctttctttttataccttttggtacccgttcacattggaggactgccacttccaagagtcggcgcacatgtcttcaagcccgcgctttgcttcccagcctaattcagccttcgcttttgccgggtctgcgaagcatgcggcgatgtctcccgggcgccggtcggcaaaacggtacggcacttcttttcctgatactttttcaaacgccttgaccatctcaagaacgctgtagccttttcccgtgccgagattataggcatccgcgcctgttgtgttcagcaccttctcaagcgctctgacgtggccctcggcaaggtcaacgacatggatgtaatcccgcacgccggtgccgtcctttgtcggataatcattgccgaacacctgcaattgctcaagcttgccgacagcgacttgtgcgacgtacggcattaaattattcgggatgccgttcgggtcttctccgatcctcccgctcgggtgcgcgccgaacggattaaagtagcggagcagcgcaatgctccattcagagtccgctttatgcagatcgcgtaaaatctgttccagcatcagctttgtctgcccgtaaggattggtcgcgcttaatggaaaatcctcagtgatcggcgttgtttccggaacgccgtaaaccgtcgctgaagaactgaagacgatttttttcacaccgtgtgcctgcatggcttcacataaaataaacgtccccgtcagattattatgataataacggagcggaacagccacagactcaccgacggcttttaatcccgcaaaatgaatgacggcttcaatctcattttcagcaaacacccggtgaacggcatcacggtcaaggagatccgcctcataaaacacaagcccttttccggtaatgtctttcacacgctccaatgcttccggtgaactatttgacagattatccagaaccacgatgtcatagccgccgtttaacagctcgacacatgtgtggcttccgatataacccgctccgcctgtcactaaaatcgccatgaagaaagcctcccctattgaatgaattgaccatattatatcggttttttcttcctcaatcatccatttccaaaaagtttaatcgtttagtcatcgtttcttcataatttgttttcattcgcgtaaaacacagagccttcgatttaaaccggttgcgaaatagaaatccctcccccgcgcatggtaagataagacaaaggagatgacggtatgaaaaatgaaatcattgaacgctttacctcttatgtaaaagtcgatacacagtctgacgaaaacaatgaaaactgcccttcaacccccggccagctgacattggccaacatgctggccgatgaattaaagtcgatcggcatgacagaaatcacagtcgatgacaatgggtacgtcatggcgactctgccggcaaatacggataaagacgtgccgactgtcggttttctggctcacgtggacaccgcgactgattttaccggaaaaaatgtgaatcctcagattattgagagctacaacggacatgatatcgttttaaatgacaaactcaatgtcgtcctgtcgcctgagcaattcccggagctctcccgctataaaggccagacgctgatcacaacagacggcacgacgctgctcggagccgacaacaaagcgggcattgccgaaatcatgacggcaatggcgtacttgatcaaacatccggacatcaaacacggaacgatccgggtcgcgttcacgcccgatgaagaaatcggcagaggccctcacaaattcgatgtcgcccgcttcaacgcggcattcgcctacacgatagacggaggccccctcggcgaactgcaatatgaaagctttaacgcagccgccgcaaagcttacttgttacggaaaaagcgtccacccgggaacggcgaaaaacaaaatggtcaacgcttcaaaaatcgcgatggaatttcatcacgcgctgccgaaagaagaagcgccggaatatacggaagggtatgaaggcttctatcatttactttccatgaacggagacgtttctgaagccgccctgtcgtacatcatcagagactttgacagagaccgctttgcagaacgaaaagaatatatgcagaaaaccgccgatgcgctggcggccaaatacggcaaggaaagcatcaagcttgaactgcgtgatcaatattacaacatgagagaaaaaatcgaaccggtcaaagagatagtcgatgtcgcctatcaagccatgaaaaacctcgacatcgaaccgattatcgaaccgatccggggcggaaccgacggatcacagctctcttacatggggctgccgacaccgaacatttttacgggcggccaaaacttccacggaaaatatgaatacatttccgtcgatcatatggaaaaggcggtaaacgtcattgttgaaatcgccaggctctttgaagagcgcgcttaaaaccaaagccccctgctttggtttttttctttcacatgaaacctttccttctttctttccgtatataaggtatgaaatggaaagaaggagtgaagactatggcaagagggactgtagcgaaagaattgaaaaaaaccttaaaagacccgcgtattctggagacgaaatcaaacccttttaaaaaactgcggaaaatgttcaaacgatttttttaagataacatctcgttttctttaaaaaaataaagaaagcgctgtcatcctgcagtcatctgttagaagcagttattttgcatattataagattttttagggtactgaataacacaaggcaaacgaaaacactgaagtagttaatttgatgcttacaaaaaatagtaaaaaagttatataaacgatcatcattcatcagccgatacaatctatagaaccacaacaagagcaaaacttcttcaacccatagtcatttttacggaaaatgacgttattttttaaaaaagtgacaattgtttgaatacttttcgtttgttttttcgtacaataataataccaaaactttttttgggaggtatgtaaaatgatgctacttatttttgctgctttgacagggtatcttgttttctctttcagtaaggacaaccgccggaaaacgccaaagacaagcccgctggtgacagctgccgacacgaataacatcattgatttaaatgcgatccgtcaaaaacgccggatgccgctatcataaaaacgacagctgccgcaaaatcggcagcctttttttatgcacccggccgatatgaaaccatccgcctccttttttcgtacaacataaaaaaggagtttttttatgtaccatttttatatcaaagagcggatgtttacgtttaagaatcgttttcaagtgtttcttgaaagcgggaaagaagtctacaatgttgaaggaaagctgttttcattcggtgatgaactgaagctgactgatttggacggccgcacgctcgccagcgtcaatcagaaactgatgtcgttcgttccccgttacgagatttccgtcagcggcaaacccgtctgccaagtcatcaagaaagtcacgcttttcaaaccgaaatttgaaatttccggactcggctgggatcttaccggcgatgtgtggggccggaattttcaagtgacagacggaaaatcaaaccggatgactgtcaccaaatcatggatgagctggggcgattcctatcatttgcagattgaaaaggaagaggatatcgttctttgtctcgcgatcgccattgtgatagatatgattctatttgagggtgacaaataaaaatatttatcgaaatatattgacaatatgagaaaacatactaagattaatagtaatacagtttattctgaaaaatagcatatttccttatcaagagaggtggagggactggccctatgatacccggcaaccgctgttcagcagaatggtgctaaatcctgaagataaggttgagatttgcggacgcaagctcttccctatccgagggaagagtttttttatatttcatcaggaaagaaggaatcgttcatgtcacagcaaaacacagaacaaccattgcatacgcttctaagaaaaaacccgccgtttcgcgcggatcaagtcggaagcctgctgcggccggcggctgtgaagcaagcccgcctgcaaagagcggcgggtgagatttcggcagaacagctgcgcgaaatcgaaaacaaagaaatcatccgcagtgtgaaaaagcagaaagaaaccggcctcaatgtcgtgactgacggcgaattccgccgtgcctggtggcattttgattttctcgaaaatttagacggcgtcgaagcgtttacgcctgaaagcggcattcagtttcacaacgtacagacgaaagcgcgcggcattaaagtaacgggagacattgatttttctcagcatccgatgctcgaagattataaattcctgcacagcattgccggcgatgctgttccgaaaatgaccatcccaagtccgaatatgctgtttttccgcggaaaattggaaaaagcgtcctaccagaatgattacaaacaatttcagcacgatgtgtcaaaagcgtataaaaaagcgattcaagctttctatgacgccgggtgccgctaccttcagctcgatgacaccgcatgggccgttttcttatcagaagcggggcttcgtcagattgaagctttcggcacgacgccggatgagctgcgcaagctgtttgccgcttccattaatgacgccatcaaggaccgccctgacgatctgaaggttacgatgcatatctgccgcggcaacttccaatccacatggacggctgaaggcggctatgatgcagcggctgaaacgatttttgacgggcttgaccttgacggattgttcctggaatatgatgattcccgctccggcggcttcaaaccgctccgttatgtcaaacgctctgatcttcagcttgtgcttggattgattacgtcgaaacatggcgaacttgaagacaaggacgcgattaaacgccggattgaagaagcttcacaatatgtcagcctggatcagctttgcctcagcccgcaatgcggattcgcctccactgaggaaggaaacctgatcacagaagaacagcaatgggcaaaactgcgccatgtcgtcaacattgccggtgaagtctggaaataaaaaaagacacgcgatcagcgtgtcttttccgttttacagcggaccggttccgattaaaatatcgatatctatcgtgacagcagcctctttccggctgataaaccgccggatgctgtcatcagtacatttccatgttaagggcgtcattttcacaagccgctcgaggtcaggctgcgataaggtcttcgtgtaacacagccgtttgcgctcaaaggtttgaaagcccgcttggaatcgtccggccgcagaatcgccggtgtcattccgccgagggctgtctccgaagaagaattcccttacttccttcaaataatcacgccgcggcaccgctttaatgactgtgccgccctttcgtaaaagcctgctgcattccttgtaattccaaggtgataaaacagacatcacgacatcaaaacagctgtcggcaaacggcgcatccgccacatcagcgacggcaaacaccctatgattcccgaaggcctttgcggcatgcagcacaccttctttcgagagatcaatgccgattcccgtcacggaaaaagcaggctgaagcaatttgcatacggcggctaaatgagacccttctccgcaccccgcatccaatatcgccgctgatgtttgcggagattgaatatgggtgatgatggcagcaatctccttttgaaccggcgcaaaaaattcccggctgtcaaaaagctcgcgtctcgcttcgaacagctgcctgtcatagcgggttttgaccgatttattgaggaaattcacatacccttgttttgatatatcaaatgtatgcccctgtccgcaaatcaagcttcggtattgtgagaccgccatggccgaccggcatagcggacacctgaacagagactggcatgattgcagtaattccgcgcgttttctttttatagacgtcaaaaaaacacctcattcattcgttattccgatgaaatgaaaaaggcatagacaaataaacctcgccaaattggaaggtttaacctattcatctatacctctcattatctgtaacgaatgaactggatgatcacgaaaatgaccccttttctgccgtcttttgaaggctgtgccctcagatccattttatcagctgcatcccgtctttacaatgaaccggaacggtttttagggttttttatacctttattatccaattacttatgccatcctttattttctttatttataatataaatttattattttgaaaatatctaaaaaggttgattttcaaaaattgaaacgataaaatactgctatctcatgtaatatcgttattcttgtatatgatcagtaatatggtctgattgtttctacctagtgccgtaaaagactagactacaagaaagtttgcataaatttgaacgagtgaaaagcatatgacgctgtctattcttttcttttggctcttatttatcacactttctggctttcaggaatttgtgacgaataagagctttttttatttccataatacccttataggagttgctcacatgtactttttattgaacattgtcggtctcattgttgtcatggctgttgttttcttatgctctcccaacaagaagaagattaaatggcgtccgattgtcatgctcctcgtctttgagtttctgattacttggtttatgttagggacaaaagtcggcggctttgtcatcgggaagatcggcgcgttctttacatggctgatttcctgcgccagtcaagggattgcgttcgcttttccgtctgttatggccaatccgacggttgattttttcttcagcgcattgctgccgattatcttcgtcgtgaccttctttgatatgctgtcgtatttcggtattctgccgtggctcattgataaaatcggctggctgatttctaaaatatcccgtctgccgaagctggagagctttttctccatccagatgatgtttttaggaaatacggaagctttagccgtcatccgccagcagcttgccgccgtcagcaacaatcggcttttgacattcgggctgatgagcatgagcagcatcagcggctcgatcatcggatcgtacttgacgatggttccgtccacttatgtgtttacagccatcccgctgaattgcttaaacgcgcttttaatcgccaatatgctgaatcccgtggacgtttctaaagaggatgatattatatacgttccttcaaaagcggagaaaaaagacttcttctccacgatttctaacagtatgcttgtcggcatgaacatggtcattgtcattttagcgatggtgatcggctatgtggcgttaacggctgcgttaaacggcgtactcggactgttcgtgcacggtttgaccattcaaaagattttctcatacatcttcagtccgtttgccttccttctcggattaggcggacatgacgcgatgtatgtcgcacagctgatgggcatcaagctcgcgacaaatgaatttgtggcaatggccgatctgaaagggcagctgaattcacttccgccgcacacgattgccgtggctacgacattcctgacatcattcgcaaacttcagcaccatcggtatgatctacggatcttatcaatctctgcttgatggtgaaaaatcagccatcatcggaaaaaacgtctggaagctgcttgtcagcggaattgccgtttccttattgagcgcggcgattgtcggattgtttgtctggtaaaagaaaaaaagcgatatcgctccgttttggagtgatatcgcttttttttattgatagacggatgcaggtacgaaaacgtcccggattcctgccgcgtacggtccgagatcatattgtccgaacacaacggcaatgccgtttttcgaaaagaagaaaggtctttcgttattcaggatgatctcctgttttttaacgtcctgatcgaacagatcatcatgtttcttgatgtagccgtaaagatagtctctcgtcttgttagctttcgtttttgtattcagcacattatcgagtgtgacccgtttttttgcggccaggtcgtaattaaaggtctgaacggatgtcagcccgtgtgcgccgcctgtgtaactgtagtcttccgtctgaatgctgagcttgccgtcttgattatacttcaccttaaaatctgcctggtattccgctttgtagccttgtttctcaccgtcttttttgtttttcacatattctttgtacgattgttcaatatagcgcttgaagtcctgattgattttcttttcaaaagatgagtttcccgtatttgtgacctcggggtacgtcagctgctttacatgcttatacgtatggcttttgacaatgggctttgcggtttgcgcggcctcggctgaaggcgcgaaacctccgaacggcgcggctgtcagcacggttaagagcacagccgccatcattttgaatgcctttttcatcacaactcctccttttcattaccgttccctttttgaaaacggattacactctatagacagcgcagatcagcaaattgtttctgggccttctttcacattttctccatgaaaaaaagagacatggaaaatccacgcctcttttaccgtgaaggtctttgcgcaatggcttcataaacagcttccgccaaatcggagttgccgaacatctccaaaacgccgataacggtttgatcaggaatcggttctgattcctccttcggcacgacaagttcttcagccgtttttcgcagctcttcgtttaaaggctgtccggggtaagccttgctgtaaatggccatcggatcaaggtcatgattgacgcaccattgggcaaacaccaaaatcatcatgttttcgtcacgccggtaatattcttcaagttgtttttcggtaaacggcttcactatcattcgctcctccagaaaatctacccctaagatacacaaacacagagcggaagtaaaccaaagatcatttcaccatcagtcagaaccctttaaataatgcaatgccctgactctctaaaactgttgtctgaatgtcccggacagcggaagatacggatttgcacggaagccattttcgttttctcccaatattaatgcttcgttcagatatttgcctctcataaaaggcgctttttcattcttatatgtttctgtcccaatgccgatgcgctgccacggctttcagaaattgttcgcagtttccgtccggaacaaggccggggccgttttcggttccggcggcgagggcgagaagttcttttccttcaccggaggcgccgatcgctttgtaatggctgaaggcttcgctgacgaagtctctggccgatttttgggctttgaggctgtctgtgctttgttttccgcccggaatgaaaacagcgtcgtacaggacggaatccgctgtcaggaaagtggctgacgcttccagcttcgtaccgttttctcccttgacggttcccagcgcggggctgatgatatcggctctgactcccgcctgtttgcatgcgtcaagcacttgtttgactttctcatcagaaaacccgtgatcggttaaaaccgcaacctgccttgtcgctgccgtcttcaccgtgttttcttggcttaaggcaggggaagtgaacgtttcatcagattcacggtccttcggcggcgggttcacgccgattcctttcgcaacacgctcggcaagcccggcgtcgacatgactgaagacatcaaccacctgctgctgcacatccttgctgttcacttttccgacttcaaaacagaacgcggagatgatatgttctttctcggcgggagacatgctgttccagaacatcttggcctgagaaaaatagtcattgaagctctcactgcgctggcggatttttctgccttctactttttcctggtaatgaacgtatccgccttcttcttctgaggccggcgacggatcattgttctgcagggaatttttatgataggcgacagggcccttattaatcgtcatccggtggtagccgtcgtattggttgttatggaacgggcagaccggccggttgatcggaatctcgtgaaaattcggcccgccaagacggatgagctgtgtatctgtataagagaaaagccggccttgaagaagcggatcattggtgaaatcaatgcccggcacgacatttcccgggtgaaatgcaacctgctccgtttccgcaaagacattgtcctgattacggtcaagggtcatttttccgatcagcttgacgggaaccaactcctccggccacagcttcgtcggatcaaggatatcgaaatcgaatttgaactcgtcttcttcgtcaatcatctgaacaccgagctcatactcgactttgccgccgttttcaatcgtttcccacaggtcacggcggttgaaatcgggatctttcccggcaattttctgcgcttcatcccatacgagggaatgaacgccgagcacgggtttccagtggaattttacaaagcgcgcttttcctttctcgttgacaaaacggaacgtatgcacgccgaagccctccatcatccgatagcttcgcgggatgccgcggtcagacatcgtccacatgaccatgtgagccgactcagggttattagcgacaaaatcccagaacgtatcatgagccgtcgcagcctgcggcatttcattgtgcggttccggttttatggcgtgaacgagatccgggaatttgatcgcgtcctgaatgaagaacaccggaatattgtttccgacgaggtcatagttcccttcttcagtataaaacttcgtcgcaaatcccctggcgtcacggacggtgtcggctgaccccttggagcccgccactgttgagaaacggacgaaaacaggtgttttgacggacgggtcctgcaaaaatttcgcccgtgtatattccgtcatcggttcgtacacctgaaaatgcccatgaacgccgtacccgcgcgcatgaacgacccgttccggaatccgctcgtggtcaaagtgcgtcattttttcacgaaaatgaaaatcctccatcagtgttgggccgcggacgcccgcttttaaagaatgctcatcctcagacacgcgaagcccctgattggtcgtcatttttttgccgctgttatcagaccggtactgctccagctgttcgtcctttgagtgttcatttactcgtttgttttgatcatcactcatgtcagttcccccttttaaaacgaaacattctacagcacatttacccgcggcgttcttcatataaactgctgatccgctcattaggattttaggtctgtatttacatatgcggtcatacacattttgaaataagccattttcacagaaagaagttgtgaaagcgcttaccaaaatagcttttgaacaggggaggtcatatcgtgcttgccatactcggttttgtgatgatgattgtctttatgtatcttattatgtctaatcggctttccgctcttattgctttgattgtcgttcctgttgtgtttgccctgatcagcggatttggcaaagatctcggcgagatgatgattcaaggcgttacagacctcgctcctaccgggattatgctgttattcgccatcctgtatttcggcattatgattgactcaggtctgtttgatcccctcattgccaaaattttatcgcttgtcaaaggggatccgttaaaaatcgccatcggcacagcggttctgacgatgaccatttcgctggacggagatgggacaacaacgtatatgattacgattgcggcaatgctgcccctttacaaacggctcggcatgaaccgtttggtgctggcggggatcgcgatgctcggttcgggcgtcatgaatattattccgtggggcgggccgacggcgagggttttggcttccttgaaattggacacgccggaagtctttacgccgctgattcccgctatgattgccggcgttctctgtgtgatcgccgttgcttatctcctcggaaaaatagaacggaagcggctcggtgtcatttcaattgaacacgcgccgtcttctgatccggaggcggcgccgctgaagcgtcccgctctccagtggttcaacctgttgctgactgttgctctgatggccgcgctgatcaccagcctgcttcccatccctgttctttttatgatcgcgttcgccatcgccttgatgatcaactatccaaatgtcaaagagcagcagaaacggatttcagcgcatgcgggtaatgcgttaaacgttgtctcaatggtgtttgcggcaggcatattcacaggcattctctccggcacaaaaatggtggatgcgatggcgcattctctcgtttccctcatccctgatgccatgggcccgcatctgccgttgatcactgcgattgccagcatgcctttcacctttttcatgtcaaatgacgccttttacttcggtgtgcttcctatcatcgccgaagccgcttccgcttacggaatagacgccgctgaaatcggaagagcctccttgctgggccagccggtgcatctgctcagcccgcttgtgccatccacctatctattggtcggaatggcgggcgtcagctttggcgatcatcaaaaattcaccatcaaatggaccgtggggacaacgattgtgatgacgattgcggcgcttttgattgggattatttcgttttaattaaaaaaggatttccgctggcggaaatccttttctgtacattatttttttgtatagcgcacccagtcataatgagcgtatagcggatttacaccattgtaggaaccgagccagtcatcgacacctatcccattccacaagttcatcatgatctttcccgggtttgtcgggatttggcttgtcgcagtatgttttaattgcccatcgacataccatttaatagagtttggctgccaatcgaacgcatacgtatgataggcattggccgcgtcaaatccgagatccgcaaccttctcatggtttcccgcgccatttgtataatagttaaattgaacctttgtcgtgtcttttcctaaaaattcgatatcaatctcatcccaaggagtgccatccgttggacctgtataagtgaagaacgatgaaacgatccccgtgtttttagccggtttcattctgacttcataaagtccatagccataggtttgaacggagcggttctccccgcagtcaaacttgttataagacgggcttgtcagcgccaaacgcatttcacctgatgacgtcattgatacattatttgcacgccacgtgcagttgaacatatctccattggaataaccatttgctttttgccataatccggagttatagctgttaaaaggttcaaaaaatgatccgcctgtttgagctgatgcagtagaagtgatcgcacacaaactcaaaaacaatccagtgacaagaagcagcagcactcgtttcatacgataaaacatgtcggcattcccctttctttgaaaacgatttctttatcgatcatacatgattctgttaaaaggggacatcggtcagaataatgataataatgaatcttaaaaaaacctaaattaccatcagcacaaacagaaatgatcagcgctcattgtaatttaggttttgcctgcttatcagtaacaatcctaacaagatcatatgtgaatgaagaaaaaaatgacaacgctttcataatgcttatttgactaccctttctatgtgaatcgttaaatacagcagctcgtcactggtgagcttgtgttcatacgtcctctcaatgcatgtttggattttcttcgtgcattcatacgcccgatggtacttttctttcactgtctccagcaaaaaatcgtcctggctttccatatgtgtgtgccgttaaaaagacgctgcgcgaaaaactttaagtgggtgacaaaccgataatagtgaagtgattcctcgttgaagtcaatcttaaaatggtattttacgatactcaaaatctcttgcatgacttttgtaatgttgatgatattgggcatctcttcattcagctcggcattgacaatatgcagcgcaataaagcctgcttcatcctccggcagagacacgccagtcttgttttttaccatggccaacgcttgtttgccgattgcaaattcgtctttgtacagccgtttcgtttcccacagtaaggcatttttgatatccagcccttttttattgcgctggatcgcaaagttaatatggtcggtcagcgacacatagatgctgtcattgagctttttgccgagctgtaatttcgcatagctgataatctcttcggatacttccatacattcgatcgggatatcatacaaaagggttttgaacttttcggatacatctttgttatcgagcgtgaacactttctcaatgcgggcttcatctaccgggtctcccgttttcttttgaaaagcaatgccccggcccatgataaccaattcctgattgccttctttgagcacactgacgacattattattaatgactttcgcaatcttcaattctgtctccctcccgcctgaccatttacctgctacaccttgattttacatcctttttgaactaggtcaatatctccaggtcaatcaaaaaacgccgttcagaaatcattgtccaacgatgaggcagcggcgcatataatgcagagaaccggtttttgggaaggagcgtgtgtgatgaaacggttttcgaaagaagaaagcagctggatgctgtatgattgggccaattcagcttattcggtcattattatgacggcggtattccccttgttttttaaagccgcggcggcggaaaacggtgtcagcgcagctgattccaccgcttatttgggctatacgattgccgccgcgacttttattttggcgatgctcggccccgtcttaggaacgattgccgactacaaaggatgcaagaaacggttttttgccttcttttttctgatcggtgtggcgggcaccgccgcgctggctttgattcccggtgaatcttggatgctgttattaatttgttatacgatttccacgatcggctttgccgggtctaatgtgttttatgatgcgtttctcgttgatgtggccgcaaaggagcggatgaatatggtgtccgccagaggatttgggctgggctatatcggcagtacgatcccttttctcctcagcattgccgtgattctttcagcacaagcggaggtgattccgctgtccgcccaggctgccggccgcattgcctttttgattacggcggcatggtgggggctgttttcgatcccgctccttctccgcgtccgccagcgctattatatcgagagggagccgcggcttgtaatcagcagttttaaacggctggccggcacgctgaagcagatcaggaagcaccgggcgctgtttttgtttctgctcgcctatttcttctatatcgacggggtcggcaccatcattacaatgtccacgtcatacggggctgacctcggcatcagcgcggcaaatctgctgattgttttatttgtcactcaggtcgtcgccgcgcctttttcgattttgtatgggcggctggccgaacggtttaagggaaaaacgatgctttatgccggaatcggcgtgtatatgattgtctgcacgtatgcttattttatggattccgcttttgacttctggattttggctatgcttgtcgccacttcccaaggaggtattcaggcgctgagccgctcttactttgcaaagcttgtccccaaacagaacgccaatgagtttttcggcttttataatatcttcggcaagttcgcttcgattatcggcccgcttttgattgccgtcaccgcccagctgaccggaaattcgtcagccgccgtgttcagcctgatcattttgtttgtaatcgggattggcatccttgcgtttgtgcccgaggagacggcgtaaaaaaagcctgcgcgcggcaggctttcttttttatttcttagctttatggactttcagttttttgcctttgaccgtcgtatttttcatgatgtcaagaacgtgcgggcctttgccgttcagaatctcgacgtacgatgcgttgtccagaatcgtgataatcccgatatcatcggctgaaacgccgtcgattttcgcaatcgttccgacaaaatcgaccgctctgagttttttctttttcccgccgttaaagtacagcttcatgatgtctttgtttaactgttcgcttttgtctgttttgacatcggggcgggcgttcagtttttccgcaaaagccgctttccgttccgctgtttctttctcagacggcgcctcccgcttttggatgcggaaaccgatatatgtctcaatgtcattcaggaaccgcgattcagacggcgtcacaaacgtaacggcccgtccgcggtgtccggcgcgccccgttcggccggtgcggtgcacatagctttctttttcaagcggaatatcataattgatgacgaggctgatgttttcaatatcaattcctctggcggcaacatcggtcgcaatgagatagcggaactcgccgcgcttgaattcattcatgacgtcaaagcggtcttcctgcaccatgccgccgtgaattttatcgcaagggtagcccagcctgtccagctcatcggttaactgaatgaccctttcttttgtccggcagaatataatgcagctgtccgggttttcggtgatcaggacatcacgcagcaaagatgttttgtcctcttcttctgttctggtgacaaaatgctcaatgtcttttgtcgtcaggccttccgcttttacttcaatcaattcagggtctttcatatatgtgcggctcagcttctcgacgtcatccggcagcgtcgctgaaaacagcatggtgactctgtttttcggcagatgctgaatgatggcttccacctgttcaataaatcccatattcagcatttcatccgcttcgtcaatcaccacatacgccagccgttcaagcggcagcgtccctttttctatatgatcaagcacacgccccggcgttccggcaacgacgtggcttttttgcttcagttcggttttctgtttgtcaaaagaagcttttccgaaaaccgccgtggcttttatccgtttgaaacggccgatattcgtgatatcttctttaatctgcgccgcaagctcgcgggtcggcgttaaaatcagcgcctgcggtttgttttcctcccattccgcaagctcgcagatcggaatgccgaaagctgcggttttgccgctgcccgtctgcgatttgacgacgaggtcttttttttgcagcgcggcggggatgacgcgccgctgcacttcagtcggctcggtgtattgcaagccattcagcgcccgtcggatctcggggctgatcgcatattcattaaactcattcatgactaaactccttctctgtccggctcccctcattatacgcgaaatgccgccgctttaccctgacgttttgccgggccattcgggggactgctttttcctcatgtcgagcacgacccatttggcgcaataaaagctcatacttccttccccgtcatcgacatagtagcggatcgattcccagccgccgtcgaccgggctgatatccagatggatgtcggtgatgctttcaagatcatccagccgggcagacctcacatcctcaaaccgcagcacggcatcatactgcccatcagtcagcttcagctcaaacaccgggattttatcataatactcgttatacccggtatagaacgtaaactccttcaattcaaaacaacccggcgaatccggccccagcagaactgctttctcatgtttgtgccattccattttgtgcctccttacttaacaccttcttctctgctgcttcatattgacggcagtaaaagcggaacgtttggttctcccactcctccacgagaaaatgctgtccatcatcgccgtcagcaggatcaattgctacaatgcctgagctagccgtttgactctccattttttttatttgaacggaagaaacgtctttgcatgtgagccttacacgaatgagatgatgttcatactcggaggaaaatgccagctcaattacagaaatctctcgtccccgaaggaggcggaattctaaaagctcctgaatcagccacttattctttttcattttctataaattctcctatagaagcggcatacaactcaacatcggcagtctcatgatcccacagataaacagtctcctccattacgctgtccgtctttttcaagcacagcttatccccggttccgttgtcggcaattacgatcaaatcgtcaggcatgttctcttctctgcatacactgttttgcctgatcacatcatcccaggttttctgtaagcggctttgttcacggatagcgaaaaaaatccactctccgatctccgcagggttctttttatgaagcagccgtttatacgctttcggaaaagacgctctcaagcttttttccgcagccctgaactcttcttctgtcatcctgttattcctcctccgtaaaaacatgagattcattcgcaagcggtcttcacttttgaaataagacaggagcgtttctttctatcgcccttattagcggtgagccaaaaaccgtaatggtttgctgccgcggatcccctagcagcccccactggaagtcctgatgaataaagaaacaatagtctccgtttggaataacggagaccagccattcaccgaattcatctttatcaattggcgcatgaggattaaatagataacattcatgctgccagtccagcgcatacatagactcttgctttaacgtacaagattgaaatgcctttagtatctgcatctctgcatcttccagaaaaccgataccattgaatccttgagatacatcaaagacctgaaacggctttggaggttttatagaagcaaatatactgcccggtttccatttcactgcgcgattcaccctgcgccacaagcactctgtctcctcttcactcaaaccatgccaattcatgtatttctgcctcccgcagttcaaacgtttcacctctgctcttcctttttcaaaagccgcctgtcagcttagtaagtaaagccggttgctctcatcaatccccgcagccgtatcttgatacgcagtcactcgcgtaatctttaaccagtcaaaatagccgaattccacgtgaaaccgattcatatcatcaggttgttccagaacagccattaagataaattcatcgtgatgatgatgcgccaaacttttgagcatttcccaaccttcttcagacaagacccagtggaattcctcgaatagataataatgttttcgttgtttaaatacttgttcgggcaacgttttgtcttcatgaaataaggaatatatttgagattgaaagactgccgattcctttgtgttctttataaaaaagggatgcatcttgtacctcttttcggcggtttacacacaagctcacagccgtattctgtgtgaaataaacagacagaaaatgagaaggacggctccactaaaataaagctgttagaaagcagccggccttcaaaatctataaaatccatgagacagtgcagatgacttgcacaatccttcagcgcacatttgatagcaccgacttcattactatacggatgaaacagataaacaatatcattcatccgttcaacccccgtatccgcaatgttttctaaaataagcgatatggctgtctccttgtcgcttatatcaacttcacgcactgcacttgggaaagaattcgataatatagtctcaaatatctgcctgctttgttctgcctcagctaattgataaacaaaccctgattcttcacaagatcttagcgaggcacgcacctgtttcattaaaaaatgcctcttgttttcctcaagcttgtcaattaacttttctctcatcactgaacacttccttacaggatattttcattctgccggcatgtatgctgcatagaagtaattaatacttcaccagatataaatcgttatcactaaagataaacatgcggtcctgtacggctctgtacgttgtttctccttttctatcaataccgtgtatcatgacgtcagtctctgataagcctttgttctcttcatgaaatgcaaatagggtatcctcgtgactctgaatcagcagcaccctttttttcgaaacggatagctgatcacaataggagtattgatcgccgtccagcacatattctgcaacagtacgaattctgtcccgtccaatctgataatgcccgatgatacagcaatcctctccctcgaaacatacatacaaatcagatttgatcgattgtacggcatagcattcatgcatcatttctttaaaatcgtcttcaaaataaaacgttctgtcttctgcatgaaaagcaaatatcgcttttccttgaggatttctctcatcatacataccctcgtccgttaatccgatccatagtaatccatcctcacccagaagaaatacattagcgcttaatagaaaagaacaaatcggattgattttattactgtttacgcagtatgcagccaattgacacgtatgattttccaggtaaacgatcacgatagtgtcatcatacgaatcaaccagatagaaatgggcatcttcagaaaatccgtgtaactcttttttgattaaaagagagctgcctttcataacctccaatattactttgtgatcgtgcaccgacacaataaatacttgatcatccccacccgcattgaaataaatgatgtgctctcttttatatgacccaacccgctccgcgataagttctaacatcagcaacactccatagattaagaatctggaatttatattaaattaatcaatgatatataaatctgctgcatcgtattcaaaccaaatgattttttcattattttcagtagttacatcaaccttttgagtgttcaggttcatgtaggacttatttttggcagggtttgctattataactacaaagtcattgatcgatgctaaaaaatataattcatctaataagtgatctgccatcaattgttctttggttagggcacattcaatatgaatgaacttcttcgaaacagtattcatatgtatcattttcttttcaaccttcttcttccattcttcaataaaagaagggaatgccattacttctattagagctgtttcgaactctaagtcattcattaattgagaaaaagtatctttactcactagatcacatgaataaatcgaattgtatttaagcggattaatcacattcagattccctatagccctcaatgattctttttgtaaatttaaaggagtgttcatgtttacctccgtaaacggtttcgttatgtaagaaaagagaggctgggaacctctcttatttgtttatttatgatttcggatgatacgcataaaatgattggtcgtcaaagcgaactgtttcagcttctacagcaatcagcatgctgttcatgccaatgagaaaattagcatttgattgatactccggaattacagcatttgatagattaccgattccttccgggtggtaactcatctcaaatacttgccaattgtattcttccggatctattttttctaatctcatatcaccaatatctgcactaaaataaacagatgctgcattttgaaaaagaatgttatgcgtacattcggctttattttcaacgacctgaatcttcagtgaaagctcttttttaaacacatgaaagtcaaaatgaaggacagcgcaccctccgtctatataatctacccattcattaattgtcttgtacaccgtttatctccctaataaagttttggagtctttgagatctgattttaaagtcttcacgaaaatttctagcttttcttcattacagttcaatttatagaaggttgtatttgaatgattttccataaatctaatgataaatctgtaatgttcgttttctttatcaatagttaggataaaaaatggttcaattgtttctaaacgtatcctgtcttgattgcctgctgataatgcttcaatatctgatatcagcattttatattcactttctaataaaacggcagagtaatcgcgggcgattgctttattatgttccaacagttcaaacgttgttgagataaatggatcatccttcgcctcatgataccttctcggtgttatttcaagttccagacaaccgtctccgattttggccatgctgtctcctcgttctctacttaatagctttaatttagtagtaaatgatttgaatgacgctctggaattcaagctaagtttaaatcgattgtcaccttttactgtctcagttctaatcacctacccacttattatctataatttttttaaaaaagcctgttaaccaaaagatgatcaacaggctcatctattttttatttaattccattatttaataatgtttataatattttccttatgtctagatcctattctgattgtctcggaatctgttatttctatatgataaagaacataatccagtaaatctttaataattgttttctctgctaaaggggctccatttaatatatcttttaactcaacatctttttccaataagattatattttcatgcgcaattattgtatttttgtactcttctgctgaggtttttataaatgagatttttttattaaacaaagtatttgtttttaagctcgctgagaatatacaagtatcactatctttatttgaaacagagtaagaatacattgcgtattgtttattttccatattttttaatataacaaatattaaatcctctattgttttatactctttttcaaccgaatcatagtcattgagagttgatatttcataaaaatagtacatttaattctctccttctatcttttatacactgtaaatcgccattgtgcactgcctcttttccatttccctttatatatagaaaacttattactttgtaaatgataaccatgattattatgtggtgtatgccactctagagatctatatatagacctcccagtctttttctttctcgaatagattattccccaataacctcttcctttttctctatccccttttatacggcctactttatgaattctatatggaatccttttcgcgattttttttgcgccttttttaataactgatttagtccatttctttgatgcattatatgccttaccaacattcctctttgcccactttcctggagcaccattccatgacctttttattacttcccatagaattctggcccagtgcccatctgggtcgaccttcatcaccggattgttattggcataagtatatccattctgatccaatgaatccccgtcactgcccgggtctgggtctagtgataagaacacgccgtttcttggttcgtagtagcgggccatgagatagtacaggccggtttcttcgtcgtattggtagcctgcgtagcggtagcggttgtcttttacttcgtcgctcgcttcggtttttgtcggatttccccacgcatcatattgatatttggcaacggtttttccggtgctgtctgagatggcgatgacgtcgccgtgtgcgttgtagtgatagaaatatttcttgccgttctttgtataggataacagctggccgctgtcaccgtacgtgtatgattttgtgacgttgttgtctgcgtctgtttcatacaggacattcaggctgtctccgtcgtagaagtagttcgtgatgtttccgttgacggttttttggattctgtttcctttttcatcatatttgtatgttgcgaacggcttgtcttcgccttttttcgttacggcggtcaggttgtcttccgcgtcccacgtatatgtgtatttgccgtcggatgtgcggttgccgtttttatcgtaggacaggtcttcgtcattcaccttcgtcagctggttcatgatgttgaaggatgcgttgactgatttgcttgcgccgtcctttgtggtggtgacgtttgtccggttgccgaagccgtcgtacgtatattgaatgacggtgccgtcttcatgagtttctttgacgagctggttgagcttgccgtattcgtactgcacctttccgcccgctgagctgtcgatgaccgtgcggttgccgttagcgtcatattcatagctttcccggaagatgctgccgccgtttttcgctccgatatgaagagagctgacgagattccgctcatcatatgaaaaactcgtgccgacttcattgccgctgatgaatgtctggacattgccgttttcatcataatcaaatgtataggctgaagtgccgtctttcatttcaatcatttgatcaagtttgttgtacgtaaagctgtttgttcctttttggccgccgtggctccatgagaaagttttcagcttatccgaatcagccggatacgtccagctttggctgccgccgcggtcggttaattcggtcaggcggtttttgttgtcaaaggtgcgttttttcgttgtattttgttctttgtttgtgacagacgtttcattgccgtttttgtcataggtaaagttgtatttttcagtgccgttatacgcttttgacttaacccggtcggtgctgtcataggtcagcgacacttcattgccgttggcggaaacggttttcgtcaagttgctgttggcgtcatattcactcttcagtacattgccgagcgggtcggttgttttgacgagcttgcccatgacgtcatattcatattgataggtctggtccgcaccggcccgaatcgtttttgtcagctcatttccttccttgtcatagctgtgaaggatggatgtgccgtttgacagggtcagctttgtcagctggtcggcctgatcgtattcgtaggcggttgtttcgcctttcgcgtcggtttcagacattttctttccagtctcgtcatatgaagcagtgcttgcataccctagttcgtcttcttcttttgtgacgtagtttcctttttcgtcataggtgtttttcgtcaggatgcttccttcgattaaacggatattatcaaaccacgccgttcctgtggcgcttttttggaacagaatgctgagttcgattttattgatcggctttgttttcggaatgactgccgccgcccggttccattcctgtgtcccctgcgggaatttggcggtgtagacgcccgtcgtgccgtccgcataagtgacgtcagcctgaagcgcgtaatcattgtcgttcgttaattttacgccttcagccttggacatccccgtcagcgtgatatataccggcttatcgtccgcgctttgacctaatgtaacggtttgttttgcggccgcattggcttgtgatgcatttgtgcgggacgcttttaatgagttttcatcatcgaagccttcatcaaggtcagcggcggctccgcttgtgctctagccatctgttttggccgtgaaactgctgttttgcaccgggttatagcttgaagagacttcgcctttttccagctgaacctgatcaaaccacgcttttcctttgccgtccttgtcgttatgatccacttccatatagacgatggcttttcctgcattggccggtgttgtaaaggtgatctgccgtttcgtccagtcattctttccggctaatgcgcctgattcattgtgaatccattgaatgcgtttttggtctttgtcacgcagatcaatgttgaaatacgctctcgccttcgtcagatccgttttgatctggccgctgagtgtatacgtcgtattcggctcaagctgcacttcctgcgttgcggacgcatggccgtgctctgttccggctgaagcggattgtgacgagatctccaatgctttttgtccggacagcgcgccgcttcttcctttgacagacgcgatgcttccgctgtctctcgtagcggtgagattccagcccagctttgttccttcaaagctgccgtctttcagcaggctcgccgaagctgccagctctttgcttgattgaatgagatttccgtacttgtcatacacggcggcggatgaggattttccgctttgatccgtttcagaaacggcatccagtccgtcgtacgcaatatcagtgacgttcccctcggtatccttcattttcgtcacgtcattgtttttgttgtactgatacgtttcggtgccgtagttgtcttttacggctgtgacgttgccgtctttatcatattgatagctttctgtcgctttgcccgcatccgcgtcgttcggatcggtgtcctgaatgacgttgttgccttcgtatacagtgttggtcgtgattttcagcccttcggcatcatcaatcagctgaatcggattgcccgcctcattatagccgtactgcactttgcggccgttcggctgcgtcatgagcagcgtttttttgtccgcgtcatagctgtagtcgtacgtttcttttttcgcattgacggctttggccaaacggtggccgctgtattggtattcagtgaacagcggtttgtcatccgtgctgtttgcggaatactgcttgacgaggcgcccttcggcatcatagtcgtagcttgtgacgctgccgtcagtatccgtcacctttttgagaaggtctttgtcatatgaatatgaaatctttttgtttttcggccctgtaagagatgtgacatggccgttttcatcataggtaaatgtcagcttgcgccctgatgcgtctgttatggcggtcagctgattgctgtcgttatattcgtatacggttgtgttgttgtgtccgtcgacgattttttggagcttgccgccttttttgctgaaataagcgttcgtctgatcttttgtttttaatacaaattgatcgcttgtttccgtcagttcgagataaacgcccgtcggcggctgatacgtgccgtcagattttttcgtgaagacatgtgttgtcgcgtcctcatcaatataaacggctctgccgtcttcagaaaggatcgacgtttccgcatcggcataccagccttggccgaacatatggtcagagctgtcaaggctgttgaatgtccgggagagcccgagccccggcccgcgtccgtcgattgacatatcttcctcattgacgatgacatttcccgtcgcgccgttcagctgtccgtccggaatgtcgataatagaccagaattcttccgttccgaggaattccgccccttcgtggaaaacagggttaaaaggtgccgtcggtatgctgtcaccgtttgcgtcataggcggtcagcgtgaaggaatagttcttcttccctttgtaattgccgtttgcgttttcgtaaacaggtgaagggtcaagcgccagttcgccgccctttccgtccgtgtgaagctggaatcttcccgctttcacttcatcggctgaaggccagatgtgtttgttttgggtcgtccaatgatcggtatccccgacatcgaatgattgatagtcttttccgttgtagatgttgattttgtagcctttggcgtttttgaccttatcccatatgagattgacataacccgtttggctcgatttcgtgttcgtatagacatagcctgtcaggtttttcggctttgcgatatcaggcagcgccggactcgcttccggtgaggcgatcgcttctccgtctttgttataggcgataactttaaatccgtaagttttccgatttgcatctccgccggcgtttttataaacggggcccgggttaatcggcaattccgcgccttttttgtctttcaggtgaagcgcatattttccggcgctgatttccgcctttgtcggccagatgttttgatcttttgtggaccaggatgttttatttccgaggtcaagcgtttcaaagcctttgccgttaaagacttgcattttatacccggctgcgcctgatacggctttccaggaaagatcaaaccagcctgtggcgttgttgttattaaagcctttcgtgcttggtttctgaactcttccgatattcggaatgacgggcttggcggccgcagacatggcgccttctccctggtcaaacaccgcgctgaccgcgacccagtaatttttacttgccggatagctgccgccggcgtttttatagaccggcgaaggattaagcgctaattcacttccgccttttccgtctgtatgcagcttatatttgccggagtcgatttccgcttttgtcggccagatgttttttccttttgtgctccaagaggttgcattgccgaccggaatggcctgatattctttcccgttataaagccagactttatagcttttggcgccttcagcttttttccagctgatattgaaaaatcctgtcgaatctccgttatgatacgctttgacagacggcgtgtccgccttcggaattgtgtatgtcacttcaatgtatggttttttatcggaatttgctgatgacatcagcttcttccaatattcttttccgttgccgtttgcgtgaagcttaaagccgtaattggcgccgccgctgttccacgacttgactgcggaggtgacatcgaagcttgcccattggcctttatagacctcggctttgccgatgtttttggagcccggcttgttcttccacgtaatcttggcattgtcgtaattgctgttaacggtgtcgagccaaagccccgtcgcttttgatccgtaataggagtgggctgtgtacgctttgagcgtcgctttcgtcaccgtcatgtttttgatcggctttagattatcaaacttcataaaagcgtagttcgttccggttgtgccgtcataatatccagttttcagcacgtacgctttcaatccggcatcccatttctgcgatgcggcagagtagtttgtcgtcgggtacgcgctcatgacaaaggtatcggatgacacagatactgatgttgaagggtcaatagataccggataaacccgtttgggatctttcagccatttttcatcggccgttacatggagcaagtagccttcactgtttttttcaagcttgaagctgacatcttctgacctgctgacttcacctgacttttcgtcgagatctgagtcggtcataaagggcttcggcacggtgtagacgacattgtctttatcatcagaaaacgcgatagagccgtcttcctgttctttagcctgaaggtcggttttgatttgaaaggtgaaggaattgtagccttcatatttgtgaagcacaaggtcttcttttatgttttcgttaaatgtgtaggtttgtaaatcaatagcaggaaacacttgctgatacgtaagctcgttgctgtcttcccttacttttgctgaggcatctgtcggagtgattgcagcctgatcggggccttttgcgccggttaatgagtatgtgagcttatgatcatcatgttcaaatgtggcgtataatccgtttttcatttgcttcagaaaatcggagttcagcactgtattctccgttccgacttcctttgagccggttttcaattcaggagaaacgtcttcccagtccgcattggcggtttctttcgtatgaatggggtctgtgtagatttcctgtttgtacacaccctcgccttcatagtaaagctttgaattctcagttctttcagacgtgatctcaccgtcttgattgatatctttttgatcaaaaggcatctgctcagatgctttttccgccggaagatctttttccgggtctgcggccggaatggcggcggttttcgcttgatcttgtttttcacgcgtttctgccgcaaacacatcggcaggcgcaatggaaatcatcagcgttgccgcaagagtgccggccagccattttttccacttgttcttttttcctattttcataggttctcctccttcttttgtaatataggcttaacaatagtaatattattgaaattgtttatcaatattttcctaggtatttaaggttattttaaggattatagggattttgaaccttttattcatataaaaaaaccgccggctgccggcggtttttcgtattatggatagcggagatttgtattttgcgctcccgcgtaagattgggcgaagtttttggcgtcctgggctgaaagggcgccgtagctgtaatttgatctcggattccagccggtgcgcggtgatttcggggctttgagcgacgggaatgaaccggtgtcggtgaattgggccgtcccgtagtcgtctatcattccgcctttttcatttccgttaccgaagtagttggcttctgagaaaacagtcgcgtttgtatgaatggtgaatcctaaattgaaattggtcacatagttgtttttcgcgtgaaaatagccgtatctcatcaggcccggtgaacgcacatagacgttattaaaatagttgttggtgatcgtcatatgcggatagccgatataattgcgtccttcgttatcatcattcggataaccgagaatcaggccgtacagatggtctgtgaatttagagttagacagcgtcacaaaatccgctttggcgccgacatacagaagctttcccaaatcactgtggctgttcggattgtagctgtgtccttcaaaccacacgtggtcaatccagtaattctgtccgttcgctatgtacatcggaatgtcgttgttgcctgtaatggcggcactatggctgataatgagatttttgaaaatcacattgtttgagccggagccggtggtcagatagatgttggtcagcctgtggctggtataagagccgacgatggttttattggcgccgactgtcacgacggctttacccggggaagaaatatcacttgtgatgacgatggttttgcgatccgttccgcccgcattgtttttcaaatcattgagattgctgacgtagacgacggggccgccctggcctcccgatacggcggattttgctttaccgttatgatccttcgcattgcccgcgaatccggtaagtccctgcatcacatccggataagccgctgccgcttctgcctgctttgatgcggaacatacgatggccagacaaagcgcaaagccgagtgcagccaagaaagcgagatgacgcgtcttttttatcatgcccttcactcctttaatttcttaaattgtaaacacaagaagtattatacaattactatcctctttttccatgatctgtttgtctgctttttcgttatggctgaaaagccccaaaataaaaaaagcagccggtacggccgcctatatacgggtgctgtctgcctgagtttccgccggcacggctttttgctttcgaatcagggacagtgccattcccgcaaaaatcaacacaatccccaaagattgataaaggtcggggcgaaatcccgtaaatacggtgtcaagcacaatcgccaccgccggatcaagaaatacgatgattgaaataaaccgggtggataaaaaccgcaagctgtcaaaaaagagcaaatacacaattcccgtatgaatgataccggtcgacacaatcatgatccagttcacatgcgacaaatcagaaaaagcgccgaaacggacgaacggaagaagaatgataacgcccaacccggtctgcaaacaggtgacggcgtatgggctgaggctgttgatgcctttcccggccagtgtcgtaaaagcataaaaaagggcggccagcacggcccaaataatacccgatcccatcagctgagaaaatgatgtacttccgttaatgccggaaatcagggcggtgcccagaaaacaaatcacgatggaagtgacggacacaatatgcagtttctcccggtatataaggctccccagaagaaggacgagaaccggagccagatgataaacggaaatcgctatcgtcactgatgtctcctcaaacgatttaaataaaaacacccagttcagcacgagaaaaaatccgcaggccagtgtctgcagcacctcacgccggttccattgttcggtgcggtaccgtccggaaccaaaccagcagacgcccagaaacaatgaggcgcacagacatctcacaaagaccagttcaattgaaggcacattcgtatgttccgagaaaaagccgattgatccgaaaatgatcatggaaatgaccattttgatgacggcatttgatgtttgttcagcttgcattgatttgcttcccccatatcattgactgtttattcagacaaatactaacagccattttacttgattcagaggaagatttcaccctgttttttaaaagccggcggtcttttctcatgaaaaaaaccccgcatcagcagggtcttctgtttaatgaacgatcagtacaggacaaggagacaattgtgagaccttatggctcacgcttccgagcatcatttctttaaatccgctgattccgcggcttccgacgacaatcagattgaaatgctgttctttcgctatgtttaaaatttgatgcgcaggttcgccttggacgtacaggctttccgcgtttactccgctttctgccgctttctgcttggcatcttccagaatggctgctcctttttgctcgacttcatgtttgatgtcttcaatgaagttttccggaacatagacaatcccggttaaagctgatgtggagacaacggcttcacgtcccgcatagagaatggtgagttcagcctgctgttctttcgccagatggatcgctgcgtccagggctttattgctcatgtctgaaccgtctactgctgcaagaatttttttaaacatatgaatcccgcctttctgcttttattgtcctcctctctttgctgaatgtcaattttgccggctttctccggaacattgcgcttacagactttctccgtttgtggcgatgacgtctttaaaccaataaaaacttttctttttctttctttcaaacgtgccttttccgtcattgccgcggtcgacatagatatagccgtagcgttttttcattctaaaagggttcgggtggcgctgagtgagtcaactccttaatcctccctacggtccggttaccgttgactcacgccctattcgcttgcttccctaaaatcctttaataacgcaattcaaaaaaataattaacacaacaatcgcagtaacaaccactgcttctacagtgtaggtcacttttttccttcgcatttgctctttatattttctttggatttccctcttcttatcaacattcattttttcggctccttcccaacccctcgaaaacttcacatcccttattttgaactaccggaataagacagctctagcgcttttcatatgtattcttcttctgtgatttctccatgaaaccgcctttctaagagcttttcctcttcttccgtcagcactaagccctcaaagccaaggattgctcttacatatttcatccctgtttcaaaatcaatctcttgcattgctaccccctcctctttatcaaaaggccctgcgggacattttcgccagcacgccccaatttatttggtgcgtataactgggcactccgtgaccgctcctaaattccaaaacaaactcaaacacaaaagaacccagtcagtcccctgtcataactggatttttcctctcgtttaggtatgcagcgccttttaaaatgcacccttttcaaaacaactcaaatcataataaaggatgcaacacttaaaggtgtctgacctcgccatagcgaacctattttacgaggtgattcgtgatggatatgggagtcaaattatcgtccaaggacgtcgcaaaacacctcggtatagagccggtgactgtccgcaagtatgccagtatgcttgaagaacaaggctactcgttcaataaagatttgaaaggatggcgactctataccgaggatgacgtaaagactttagagtatctatgtacaatgactaagatcaatggacactcactcgacgaaacggtaaagcatatagcaagcctgtatcgttcaaaactgaccatatcggataccgctacatcgctacaggacaatcctttggtggaattcataaagcgacaggaagaattcaaggatggaacaattcgaaaaaagacagcatgaaagacacgagacactcactgcggcattacggaagtcgctagagacacaaagaatgatcgcagccactaaacaaaaaaagtagtggcaattttggaaatagaacacacggaaaatggcgcacttatacacacaaccctgtgtacatgctaaatctctcgatttccgtcaggcgtgttacaaaaaaggagactttcaccgagtccacttttttattttttcactcatgcataacaattttctctcttttgcaccgcaataaaaaaacaggcctgaaggcctgcttaatctattttagcttttttccatgtactcctaacaattcccatgatcactatgtatacaatcgcaataccaacagttacaccctcaatttttataaaaaagctattcaaaattattaataaaaacgctagtactgacgcaaaccagtgtatagattcatattttttgtcactcattgctgatcccctcactctctctgttaaacactttatataccaaaatccatcatgacacaatttctgctatggaatcaagcggtaaaatggtttataatttacaaggtatttttaagtaaaaaagggggataatatgaaatttgttctaaagtacagaagtaaaattattttggcagttgtttcagtgtttttattttcaatccttggaacgacagccgctgaggccgctgaatcaccgaataatcaatcattagttcgagacaataatctcgaaaaagaattttcaagtttgctttctagtcaaaaagcattatacgcaattgaaaacatacctgactcagtgatcaaccaaggttctgatgcaattttaaattggttcagaaataacatcgatgatcaatcgctaatcaatgatatgaacgccgctgcaactgagcttcatcaatcggacaaaccattcaagactcaaggtgtcctaggttgtataagtgctgttggtaccgcacttgccagcctagctttcgctcctgcaaaattgttaaagatcaaaaaggcaataaaagccttgggtggagtaaagacattcgtcactaaaacatatcagtactacaattattacaagaaaaaataccgcagtaaaaaaaccgcttggaacaaagcagtctccaaagcagcttcaaaagccagccctgaaataaaagaggcgataatggacttctttggcattacggccatcgtttctgcttgtattgaataacggttccacaaagtaagagagcaagccacatggcctgctccctttcacttgattatgtaatttttgatgccgggatgccaataagccatgacctcaaaagcgctgtttgccacctcatcgtcttcctcatcaatcttaaccagatcgccgtcttccgcatcttcaaggttcagatctttatgtatctcctatctccttcaaaatgccgccgtacccgatcagccttcgcgcagaaagcgcatcatccaagtaaaacacagtatttaagttatcatccgtcaccttgctgccacgcaccacatccgtctccttaacaggatatttagaaatttcgagaactgctttttgctccatcatggcttcccgcacatcgctctcaatttgctcagcatcaattttagctcttcccttgactcttcgaatgtcaacaatcggcgtatagtccagtttcatcgcccttttccaaagacttgtccattctgcctgcttgatataatttttgccgaaataacttctctttacaggcaataacacatgaaaatgcggatgatatgtatcttcttcatgatttttagtaatctctaaagctctaaaatagccaagtaccgctgtatcgacccttttgtatttcatgagacgattaaaccctttcatcatgtcagaaatcttaggcttcagctcttctcctgctacatttctgacagtcagcgtgagaaaaatccacccgcaaccgtactgccggttagcttcttctacaattaatttattatgataagcaatttttaacgaccggcgccacgcacacatagggcataacctcactttgcaaaaatgggcttgatacagcttcagtttgtcccctgctttaccatatggaaatccatcttgatctcctgtcccatatcgcacctcatctcttctctttttgttttcggatctcattctcaattgatatcgtattctgtgctgaagtgtatgcacgtcaccctctaatatagaaatcttttcattaattcgttcaattaccccgttcacctggtcctttttgatatcagcccaggcatgtgccatatcttcgcgacactcttcaaaggcctttgcatggctccctttccacgtatgcggggataaatgaggctgactgatcaaatggttgatatctgaaaactcatgttttaaatttgttatttcatgtctgacttgtttcagggcatgaatgtgctcttgttttatatcaaagtcggctcttgccgaatgtaatgcgttcatctctgctagtataagtaaacacctcgcttgtaaattttgggcattatagactattttcatgctacactatgggtttatttggatgaataggaaaaaggaattatttatcaccggaaaaatttataatcagttatttacatattcgtttttataaaagtttctatctcatctattgttctttcaaaattctctttaaaagcatgttcccaaacccttaatatatgccagccatgttttatatagtaggaagtaaccttttgatctctttccttattccgcttcagttttttctcccaatacactttgttgctttttggctgatttccgtgagagctgcatccgtgccaaaagcaagaatcaacaaagataacaattttgtattttttaatagctatatctggcttaccaaaaagagatgaaacatttcttctgaatcgcagccccctgttccataaggctgcggatactttatcttctaattttgattttgctttaatcgcctgcatattctttcttctttgttcttttgtatgagtgtcagccatacgattcccctcccgatttgtaaaagttttccctcaatgaaaacatttaaatcttctattaaaacaaaagttttctccttttaaattcgcgaaacaaacgttctctttttagcgttaagatgtgttatagtttataatgtgtatgagatcaacaaatggaggtttttatatgatcttccgaaaaggagaattgttcagcggaccaggaggactgtctttaggaattacaagtgcccgtgtcgttgacagttccggtaatgaatacagcataaaacatgagtggtctaatgattatgacgaatctgcatgtaaaacatacagaagaaatatctgcaaaaatattgatgacccatcagtaattgagggtcctgtgcaagaattggatatagaaagcctccctcctatagatgcattagcctttggattcccttgcaatgattacagtatagttggagaacataaaggaatgagcggcgattacggccctctttactcctatggtgtaaaggtgctcaattatcataacccgaaatttttcattgctgaaaatgtgggcggtctgcaaagtgcaaatgaaggtaaagcttttattcagatattgagggaactgggagaagcggggatgggttatacaatcactcctcacttatataaatttgaggaatacggcgtaccgcaaaaaagacaccgtattattatagtaggtatcagaaaagaccagaatttagaatttaaaattcctgctcctactactccaaatcagtatgttactgcatacgacgcactcaataatccgcctattcttgattttactgaaaatcatgagcctacgaaacataatcaaaaaactattgagatgctgaactatattcctcccggaaagaacgcctggtatgagggcatcccggaagaattacgactcaaagtgaaaggtgcccgaatgagtcagatttataaacgtcttcatccggatgaaccatcttatacggtgactggaagcggcggcggcggcacacacgtgtaccattgggaagagccccgcgccttaacaaatagagaacgggcacgcctgcaaacctttcctgatcattttgtatttgaaggaaagaaagaaaaggtaagacagcaaatcggcatggctgtccctccaaaagctgctcaaattattgcagaagcgatactaaaaacgtttgctggaattgaatatgactccattgagcccaaatggacttttaaagagttagttaaagaggaaaaagttccatttctcatctaaaatacaatcgttacttgcaaatgacaacatttgcaagtttttcatttgtttaaaaataaaaaaatgggactgacccccttttttaatcaatgttcgatcgttaagatcagtcccgtccttttatagcatttttaatcgttcggtatgtcattagttgaaaacataaaataggtatttccatctgggaaccttaaattaggcacccataaaggtttgtcatcagaccaccctttattcacagatccagtgtacttatacataattaaagtcggaccatgcggattgaataataaattatcatcagatgacagcattgttctggcattcttttttatgtctctgtttctgcgtacggcaatatagccgcggttattatacatctctttcatatttttcaaacaagctaaaattgcttcatcatcccagctgccgccctcaatattcttagacttagttagattgacgatttctatcaatctttgaatcgttatcatttccagcccttgctcatctttataatcttctaataactgatctaacaaacccacattacttaccaatggatttctaggaaaatagcgttttcctgacatataaaataatacagaatccagatagataacattcgatcttgtcggcctgagcaaagagtgttttgtccttgatagaactaatgcttgaaggtcactagaatcagccttattaattactgttcttaatcttttttcagaaagataggcttctgtaaaaatctcagctattgagtacgatgtgaaaaatcttagcacacctaaatctcgttctctataaccatacattctggcatgttgaagaattgtatcaacttttggcgcttgactggaacgtccataataagtaactaatagccttttaactgttactcccctgcctaatttatttcctcctattagaatattaaatggggaactgtatctaggttttttaaaatgactccccgaaataattaattgtgactgcgtgctggttatgttatcagctagctccgctataactaattcaaatgaaggcgtcctgctgttagtttgcaccaaatcttgataagcttcatttaaataagtatatacaatatttttttctgtttcatggttctcttcgtgcaaagccttagatagacttgtaataaaaccattaaccatcgtctctaaccttcgatggtcatcctgtttatgactgacgtgacaaagaaatgtataatttgtcccttctccattgcaaattttagttgaagctccaataaaaaaagtgcatagagcttgtcttaaaccggtagggatagcgagcccctttgtatggggagcaatatctgattcttcgttcattatgtcatcaatctctgagtctgcaaatgtcttgagagcaccagcaccttcttcaaagaacgcttctccccctatataacctgcgccgggactgaatttcacaataaaatccggtcggaattctttgtttgcgccttgtaataacagtgcttgaggcgtagcggttacttgaacatagacatgattgttaaaaaaatctctaaggttaacaatagcagcacttacttcacttaatttatcctgcacttcagtattggcaaacgtatttaagctcgcttgatctgcttcatcatcaaatataactgatcttgtattccggggtatgtgctctttaataaactcctgcattttaggtaatatttttttattcttagtggtaactaaaacaactcctccgttatggtttaacgctgtttgaattctagaggtcattgattcaattccccatgaatcctttccaagagtaagtaaccctgggagcgcttcttgaacacgctctaaggtctggtcatacaaccacaggttgtcagatgtcagtatgataaataaacgatggccattatccgaggcttgagcaattgtcatcaacatattatttgttttaccgctttgtacttgtccaaacagtaagccttgacgggtttcattattaggaaaccctatcttttcattcatttcttcagctgttttttttatcttattgatttccttttctgctaattctctctttaagactctgctgaacttctcaaccttacttattccagatcgaatcattatatttctcccttagctaaaatccataaaataagtttcattatttattttatatatggtgacatgatgtctcccgtacctatctaaatcttcaactctaacaaaactgcctaatggtacgttgagtctttttctgaagtattttcccagtatgctattatcctctggtgtctcaagagctttattgttttcttgcgctactacacatgtaaaactctctccatcatctgttatcaaattgaattgcattttcttatctggaaaaaagtcagttgtataaacttctttaggaatagggatataggcttgattcgactctctatccggacgctgtccccaattcaaccctgatttttgatgaatcttccttctatcacttttaatagttaacggaaaatcaaaatgtttatattctttttcttttactattttccctaacccagacccttctttttctgaacttttcaaatcagactgatatgtaaatgtaatatactcttcaatattaggatgcttaaaatctatatactctccaatatcattaaaaatattgcctatttctattgggtcagcctctgccattatttcgctataattaacatagccatttctagtaaaatttgcagatccaacaaaagctagttctgatgcaaataatccctcctgctcccaataaataattttagagtggacaggtctctctccataaaaataatttacacttaatctattagtttcactcgccatttttaagtattctttgtgatcccatactgttattggctgatattttgtcataccgatgtacatttcaatttcaatttcattaaatccatatagtacatgatgtaaaaaagcaggggaagcataagcagtaatcacttttagctttcttcttcctttgttatatggatttagtataatattattaaataaacgatctttatatacaagaatagaacttccctcctattttaaaaaacaatattcaaggactaaagtttaagaattagatttgcgttaattgcatatacatacttattatatctcttttggataaaactagtctagtgcttgtaaatgcattacaaagttacttcactccccaaacagcctccccatcaccgctcagcacactaaacgtcacaacttctttctctctcgccgagtcccattctttcaggaagacgccgtcataatttgtgccgttcaggctgattcgggctttgctgctgtccgttattgtccaggttccggtcatttccccggaaatggtgccgtcgttgttaagccggatgttttttggggttttgatcgtagctgtgatgtcttttccgtgctggatgagtttgtaggctccggatgcggcggatgccgaaatgtgtgtatccggttctcccgcgtagcggtatggcgctgcaacgggccatccgtctttgttcatgtacagccgatgtactctgacttcgtgctcttcgcctctgttcgggaaacgggtgtggaaaatgaggtatgatcgtttcgttttcccgtcgtaaaacacggagttgtgtcccggcgatacgtagcccgtgcctttttcagattgtgaggcgaagctgtagccgcccatgagtttgaccccgtacggttcaattgctttgtcgtcaaagaaactgccgtcttttcctttggcatcaagcatgttatggcctgcggcgtcatagtacggaccgtccggatttttagagcgcgccacacgcatatgataaccgccggctgcgtcaagtccgccgaatgacagatacagatagtaatatttcgtttccggattgtagctgatgtacgggccttcgattctgctgtgatttccgccgagcagtttttttccgtagccttggttcgggagcgggaaaccggttttcggattcatttccagtataaaaatccccccggagtaagagccgtacaccatccagagcttgcctttatggtcaaaaaacgtttgcggatctacgacgttcgggtgaacgtttgcatgatacgtcgtgccgtcttcgctttttccttccatgcccgatttcaaaaagatgcctttgtttttgtagggtccttcgatcttgtcactcacggcgacaccgagagcggatcgcggcgagtctcctttacaggcgttatagtacatgtaatatttcccgtcagacagctgggcgacgtccggcgcccacagcgtatcagactgggcccagtcgaatgtctcttttaattcggtgtagacgttcgggatcaggggattattgggattgacgcttgaagatatctgctgccactgcatcaggtttttcgacttggcggaagccaaatgcgagccgaatacataatatgtatctcctgttttgatgacggacggatcatgcacgctgacctctgaaaaaaccggatgctgggcttttgcctgcggcagagtgaatccgatgaccgctgctgagaccaggcacacacgaaagaaactggttttcattttctgaaatctcctcgctctcttcttttcttaaaacgctttcaagacaacgctccattttatgatgcggatggcggaaatatgtgatcaacagcgccggcttcgcgatgtaccgctttacttcgataacaatctgatttgtgaaagactggaaaaaaagttttgacttctgattcgcaaacacttaatataaaaaacagttactagttatcagaatatttaagaattgagtgaagcatatatgaccttacacaaagaccgccgcatcgggcgcttatccgtccttcttctgcttcatgagactgaagaaaaccagcagatcagacggctggaacgggacggctggaaagtctgtctcggcagggtgggttcaatggatgcgcataaggtggtagccgcaattgaaaccgcttccaaaaagagcggcgtcattcaatctgagggttatcgcgaatcacatgcgctgtatcatgccacaatggaagctttgcacggagtgacgcggggcgaaatgctgcttggctcgctgcttcgtaccgtgggcctgaagttcgccgtcttgcggggaaatccgtatgaaagcgaagcggaaggcgattggatcgccgtttcactttacggcacgatcggagctccgattaaggggcttgagcacgaaacattcggagtcggaattaatcacatatgaatcagcccatagatttcagatgatagggggctatgcgtgaaacatcattttcatggcatagctcctttttgtatgggcgctttaccaaagtaaaggaaaaggggttgaaatgatggtgacgttagacggttcctcactgacaaccgcagatgccgagcgtgtgctgtttgattttgaagaggttcaggcatctgccgaaagcatggaacgtgtgaaaaaaagcagggcggcggttgaacggatcgttcaggaagagaagaccatttacgggattacgacgggattcggcaagttcagcgatgtgctgattcaaaaagaagacgccgcggatctgcagctgaatctgattctttctcacgcgtgcggcgtcggtgatccgtttccggaatctgtatcgcgggccatgctgcttttgcgagccaatgccctgctgaaaggcttttccggcgtgcggactgagctgattgatcaactgctcgcgtatctcaatcatcgcattcacccggtcatcccgcagcaagggtcactgggggcgagcggagatttggcgccgctttctcatctcgcactggcgcttatcgggcaaggcgaagtcttttacgaaggggcccggatgccgacagctcatgctttagaaaagacaaaccttcagccggccgtcctgacctctaaggaagggctcgcgctgatcaacggaacgcaggccatgaccgcgatggggctgatcgcttacctcgaagccgaaaaactggcctatcagtcggaacggatcgcgagcttaacgatcgaaggccttcagggcattatcgatgcgtttgacgaggacattcatgccgcccgcggttatcaggaacagatggatgtcgccgagcgaatccgctattacttgtcagacagcaaactgacgaccgtccaaggggagctgcgtgtccaggacgcctattcgatccgctgtatccctcaagtccacggcgcatcatggcagacattagcgtatgtaaaagaaaaattagaaattgagatgaatgccgcgacagataacccgctcattttcgaagacggcgccaaaatcatctcaggcggaaactttcacggacagccgatcgcctttgccatggattttctcaaagtggcggcggccgagcttgcgaatatttctgaacgccggatcgaacggcttgtgaatccgcagctgaatgacctgccgccctttctgagccctcagcccggcttacaatccggagcgatgatcatgcaatatgcggcggcctccctcgtgtcagaaaataaaaccctggcccatcccgccagtgtcgattccattccttcatcggcaaaccaggaggatcacgtcagtatgggaaccatcgcctcaaggcacgcctaccagatcatcgcgaatacgagacgggtgcttgccgttgaagccatttgcgcgctgcaggccgtggaataccggggtgcggaacattgcgcctcttacacaaaacagctctatcttgaaatgagaaacatcgtgccgtccatacaagaagaccgcgtgttttcttatgacatcgagcatctgagtgactggctgaagaaggagtcttttctgccgaatgagcatcaccaaaaactgatgaccaatgaagggggactgacaagatgactgatgtaaagaaatcaatccgcgccggccgcggcaccgaacttgaatgcttaggatgggagcaggaagccgtgctccgcatgctccgaaacaaccttgatccggaggttgcagaaaagccggaggatctgatcgtatacggcggcataggcaaggccgcgcgaaactgggatgcttttcatgcgattgaacgttccctcaaaacgttaaaagatgatgaaacactgctgattcaatccgggaaaccggtcggactgttccgcacgcacagccgcgccccccgcgtcctgctggctaattcggttctcgtgccgaaatgggcggattgggagcatttccacgaccttgagaaaaaagggctgatgatgtacgggcagatgacggccggcagctggatttatatcggctcacaaggtattctgcagggcacctatgaaacttttgcagagcttgcgagacagcatttcggcggcagtctgaaaggaacccttacgctgacggccggacttggcggaatgggaggcgcccagccgctgtccgtcacgatgaatgatggcgtcgtcatcgccgttgaagcggatgaaacacggattgataaacggatagaaacaaactattgcgaccgtaaaaccgcatcaattgacaaagcgctgcgctgggccgaagcagccagacaagccggagaacctttatcgatcggccttctcggcaatgcggctgaggtgcatcatgagcttttgaaccgcggcgtccatattgacatcgtgaccgatcagacttccgctcacgacccgctgatcggctatattccggcaggatactcacttgaagaggccgaccgcctgcgccgggatcagcctgaattatacgtaaggctttccaagcagagtatgaaaaagcatgtggaagccatgctcgccttcaagaaaaaaggggctatcgtctttgattacggcaacaatatccgccaggctgccaaagatgaggggctcgccgatgcttttgattttccgggattcgttcccgcctacatccggcctttattttgtgaaggaaaagggccgttccgctgggctgcgctgtcgggagaccctgaagatatataccgcacggacgctttattaaaagagctgtttccagaaaatcaagcccttcaccgctggattgacatggcacagaaaaaagtcacattccaaggcctgccgtcccgtatttgctggctcggctacggtgaacgggaaaagatggggctcgccatcaatgaattggtaagaaacggcgagctgaaagccccgatcgtcatcggaagagaccatttagactgcggatctgtcgcctctccgaatcgggaaacagaagcgatgaaagacggaagcgacgcggtcggcgattgggcggtgctgaacgcgctgatcaacacggcctcaggcgcaagctgggtttcttttcaccacggcgggggcgtcggcatggggtattcccttcacgcgggaatggtcgcggtcgctgacggcagcatccttgcggaacagcggctttcccgcgttctgacaagcgatccgggaatgggcatcatccgccatgcggacgcaggttatgaaaaagcgtctcaagtcgccgaggaacatgacattatgataccgatgaaaaaggagcggtaacatgccgaaacaaatagataccttactcaccaacatcggccagctgctgacgatggaatccggcggtccccgatcaggcggaagcatgcaggatcttcaagtcacggaagatgccgtcatcggcatttccgacgggcgcattgtttttgccggacatcagggagcggaggaaggatacgaggcaagagacatcatcgactgcgggggacggctcgtcacccccggcctcgtcgatccccatacccatcttgtattcggaggatcccgggaaaaagaactgaatttaaaaattcagggcatgtcctatttggatattctggcgcaaggcggcggtattttgtcaacggtcaaagacacgaaagccgcttccgaagaagaactgattgaaaaagggcttttccacctcggacgcatgctgtcatacggcatcacgaccgcggaagtaaaaagcgggtacggactcgacaaagacacggagctgaaacagctgaccgcggcgaaaaaactgggcgggcgccagccggtcgaccttgtcacgacctttatgggggcacacgccattccgcctgagtaccggaacagccctgacgaatttctgaatcgcatgctgcagcttttgcctgaaataaaagaaaaaggcctcgcgcaatttgccgatattttcacagaaacaggcgtctttaccgtcagccagtcgcgggactacctgaaaaaggcgtctgaagccggtttcggcctgaaaatccatgctgatgagattgacccgctcggcggcgcggaattggcggcagaactgcatgctgtttctgccgatcatttggtgggggcgtctgacgaaggcatcgaaaagctagcggcgtccggaacaatcgccgtcctgctgccgggcacaactttctatctcggcaaacacacttatgcgagagcccgggagatgattgatgcgggcgtacgggtcagtttggcgactgacttcaacccgggcagctcaccgacggaaaacctccagctcatcatgtcgattgccgcgcttcatttaaaaatgaccgcagaagaaatctggcacgctgtcaccgttaatgccgcgtatgcgatcggaaaaggcgaagaggccggacaaattaaagccggacgggcggctgacattgtcatttgggaagcgccgaattacatgtatatcccgtatcattacggcgtcaatcatgtacaccgtgtcatcaagaatggaaagacggttgtctcaagggagggagccgctcttggataagtatccgtttctgcaaaaagccggctccctcttcaacgaccgccatgtgacaaggatcggcgatgtgacggaagcgtgggcgggacaaccgatcaaagggccggctttgatcggcgttccgctttctaagtcgtcaatcagccattccggcgcctgctttgcacccggtgcaatccgccgggcgctcggcggcatttccgcttattccgcggagctgcgggagcatgtcattgaccatctgtacgatatcggcgatattcagattcacgtcacggatgtcgtcacatctcacgaacacatttatcggaccattcatgacattctgacagaccagcctgactgggtgcccgtcattctcggcggcgacaactccatcagttattccaccatcaaagccattgcggaaacgaaaggaacaacagccgtctttcaattcgacgcccaccacgacgtccgcaacacagaagacggaggaccgacaaacggcacgccattccgccggctgttagatgaaaatatcataagcggacaaaacctgattcagcttgggatcagggagttcagcaacagcttggcatacgaacaatatgtaaaagaacggcaggcagacgtgcatacaatggagatgatccgggagaaagggctcctccgaacgatacaagaggtcttgccggccgttcaaaaaagagccgacgccatttttatttcggttgatatggatgtgctggatcaagctcatgcgcccggctgccccgcgatcggccccggaggcctgtataccgaagaactgcttcaggcggtccggtttttagccagtgaggctgacatctcgggtattgagatcgttgaggttgatccgacacttgattttcgcgatatgacaagccgggcagccgcacacgtcattttacatgcattaaagggatttaaattgtcacgttaaagtcaaatccggcacgcgtgctctcggctgccggaagattctcacgccacgcaaaaagggggagatcacgatggatgttgatcaaggcggcaatcaactaaagcgcacgatgaaaagcaggcacttatttatgatttcattgggaggggtcatcggcacggggctgtttttgagcacagggtatacattaagccaggccgggccgggcgggacgatcgccgcttacctgatcggcggcttgatgatgtatcttgtcatgcagtgtctcggagaattgtcagtagccatgcctgtgaccggttcatttcaaacgtatgcgacaacgtttatcgggccgtccacgggttttatggtcggtatcatgtattgggtgaattgggtggtgacggtaggatcggagtttacagcttccggtatcctcatgcagcgctggtttccccacagcagcgtctggatgtggagcgcgattttcgcggctctcctttttgccgccaatgcattctccgttaaattgtttgcagaaacagagttttggttttcaagcgtcaaaatcgttaccatccttttatttatcatcttaggcggcgccgcgatgttcggtttgatttcattgcacggttcgggtgaagctccgatgctgtcgaattttacctcacacggcggactgtttccgaacggctttcttgcggttttcatcgcaatgatttccgtaagctttgccttttcaggaacggagctgatcggcattaccgctggtgaaaccgccaatccggcaaaagatattccgcgttcgatccgaaatgtcgcctggagaacggtcatcttttttatcggcgccatttttgtgctgtccggactgatctcctggaaggaagccggtgtgattgaaagtccgtttgtcgcggtcttttcccaaatcggtatcccatacgccgcagatatcatgaacttcgtgattttaacggctttgctttcggtcgccaactccgggctgtatgcttccacccggatgctgtggtctcttgcgaatgaaaacatgatcagcgcccggttcaaaaaagtcacgccgaaaggcattccgctgaatgctctgctcgccagcatggccgtttcctgcatatccttgatctcaagcatcgccgccccgggcacagtctacgtggtgctcgtggcaatagccggatttgccggcgtcgtggtgtggatgagcatcgccctgtctcagctgttatttcgaaaacattatgtgaaaaacggcggacgcgtctcggatctgaccttccgcacaccgttataccctctcgttccgatcgccgctgtgatcttatgtttcgcttcatgcgtaggccttgcatttgatcccaatcaaagaatcgccctcttctgcggaattccttgtatgatcctgtgctatctcattcgttttttgagaaagaaacagccgaaacaatccgtccgtgacattcatttggataaaaccatgccataaaaaaaggcacatactgatgaggtatgtgcctttcttctcttattccgtaatcagcgtatgaatcagtttcggcgcttccgctttttctgagatgcggatgttgtcatagactttggcggtcacgtcttcaacgttttcgcggttggcgtaaagggtgacgagcggctcgcctttttcgacgttgtcaccgacttttttgcggagcataatgccgacggcaagatcgatttcgtcctcttttgtcgcacgtcccgcgcccaacagcatcgctgcgacgccgatttcgtcagcgacgatttctgaaacgacacccgcttcttttgccggaacgtcaattttgtacgccgcctgcggaagtttggacggatcgtcaacgacagaagcgtctcctccctgattgctcaggaactctttgaacttttcaagcgctttgccgtttttcatgacttcctgaagctttgttctcgcttcttccaatgtctcagcttttttcgccaatacgaccatttggctgccgagcgtgaggacgagttcgtttaagtcttcaggcccttcccctcttaatgtatcaatggcttcttgtacttccagagcattcccgatcgcaaaaccgagcggctgcgacatgtcagaaatcacggccatcgtctggcggccgacgttgtttccgatgcggaccattgctttggcgaggttcacggcgtcttcatccgttttcataaacgcgccggctcccgttttgacgtcaagcacgatggcatctgctccggcggcgatttttttactcataattgagcttgcgatcagcgggatggagttcaccgtacccgttacatcacgcagcgcataaagctttttatcggcaggcgtcaagttgccgctttgtccgatgacggctaccttgtcgcggttcacaagcttgatgaattcatcttttgacaattccacgtggaagccttcgatcgcttccagcttatcaatggttccccccgtatggccaagaccgcggccggacattttagcgacgggaacgccgagcgccgcgacgagcggtgcgagtacgagagttgtcgtgtcgccgaccccgcccgtagagtgcttgtcgaccttaatgccttcaatggcggaaagatcaatcgtttcccctgaattcaccatcgccattgtcagatcggcgcgctcctgatctgtcatatcctgaaagtaaatcgccatagccagcgcgcttgcctgataatcagggatacttccgtccgtatatccttttacgaaaaattgaatttcttctgttgtcagttcttttccattttgtttttttacaataagatctaccattctcatgatctatcacctgtcctttatttatgttcagtgaatcaatccgacgatcgccgctgtcaggaagctgacgagcgttgcgccgtacagcagcttcagcccgaaccgcgcgacgacgtttccttgtttttcatgcagccctttcaccgcaccggtaataattccgatagaggagaaattcgcgaatgagacaaggaatacagataccactgcctgtgtatgcgcactgaaatggaaatcgccggatgagagtgtctgcatcgccacaaattcattcgataccattttcgtcgccataatgcttccggcgctcaccgcttcattccacggaataccggttaaaaacgcaaacggcgcgaatacatatccgagcagcgcctggaatgtaatgccgaagacagcgttaaaaacgccgttgaccagggcaatgagtgcgacaaatccgatcagcatcgccgctacgacgacggcgactctgaatccatccattatatactcaccgagcacttcaaaaaaggattgcttttcttcttcaggaacgacgatcaaatcctcttctttgctgacggtgtacgggttgatgatagaagcgatgataaatccgccgaataagttcagcacaagcgccgtcacgacgtattcaggcttcagcatcatcatgtaagaaccgacgatcgacattgagaccgtcgacattgcggacgcgcaaagcgtatataagcgctgttcagtaagataaccgagctgttttttcaaactgataaagacttctgattgccctaaaatcgcggatgcgacagcgttgtaagattcgattttccccattccgttcaccttgcttaacgcaagaccgatatacttcgtgatgaaggggaggaccttccaatgctgcagaattccgattaaagcggatataaagacgatcggcagaagcacgctcatgaagaacgtcgtctgtttcgcattcacaagcccgccgaatacaaagttaatcccttctgatgcatattccagcaagtagttaaatccttttgcaaaaccgccgacaagaaaattcccgataccggtgttgaggagaatataaccgagaatcagctgcagcacgagcatgacggcgatcggccggattctgattctttttttgccgttgctggcaagccaggcaagacctaaaaacacaatgattccgataattccgatgagatacttcatatgtgttctccttttatttgtattcgcttacaattttttatgcatcaacaaagaaagaggatggcggaagctttcggcttccgcactgctgattaatagtcgctgctgccgctgtctccgccgctcacgatagagacgcccgcacttgcgccgatccggctcgcgcccgcagcgatcatgctgtcaacatcagcttttgttctgatgccgcctgatgctttgaccccgatgtccggtccgactgtttttctcatgagagcgatatcttcagccgttgccccgcctgtagaaaaaccggtagacgttttgacgaaatctgcgcctgcggataccgccaagcggcacgcgcgctctttttcttcatctgtcaaaaggcatgtttcgatgatcactttgacgagcgcttttttatcagctgcttcaactaccgcgcggatatcagcttcaaccgcttcatcatcgccgtcttttaatgcaccgatattgatgaccatgtcaacctcagttgccccttttgagatggcatccttcgtttcaaatgcttttgtttccgatgtcgttgcgccgagaggaaatccgataacggtgcaaacgtcaactccagtgcctttcagttcctccgctgcgagtttgacccaagtcgggtttacacaaacggaagcgaatttatattcttttgcttcttttatcagttgtaaaatatccgctttttgtgtatgcggtttcaaagcagtatggtctatttgacttgcaattgacattgtatgcacttcctttttcctaggatacgtttagaataaccgaattttgaacatatgtaaattggtaattgaaattatgttcaagaattgtcacaattcttgaatgagttttttggccgtatgctgatcagtaatcaaaacgttggcgtactttcctttcagggcaccgtgaatggccttgcattttctgctgccgcccgccaccagaatcgaacgctctttcattttcaagtcgctgagctcgactccgatcgtcctgccgttaatgctgctgctgcaaatcctgccttcctcgtcaaaaaagcgtgaacaaatatcgccgactccgcgtgctttcagcaattgtttctcttcttcccggaaatagccgagtctgaaaagcagcgcctcatcccggacggttccgaccgtaaacagggcgatattggcttgtctgcccatttcaatgatccgcttaatatgtctgtcccgctcgaccatctgtttcacatcggcgctgtcaaatataaccggcagcggcaaatacctcggcatcgtctgaaatgcttcggcgaacagctgaatcgtttctgacgaatacgtattgacattggaatgactgatgccgcctttcagctgcacgacttcaacgctctttacctgcttcggctccatgcggcttgcgatctggtacatcgtcgtcccccagcttacgccgagtatatcgccgtcctttacggttttatgcatatagtctgcgccatagcggcttaagtaatgtgtaatggcctggtaatcgtcacttggagaaaagacgacgtgcgcctcaagcagcccgtatttttcttccagcttcgcgccgagttcgtccagatcctcaaacgggtccatgacgcgaatttgaacataccctttttcctttgcgtactgaagcagccttgaaacggtggggcgtgacagatcaagccgttcggcgatctgctgctggctgtaatctgattgataatatagttttgccgcttctatgctgagctgctgtttttcacgatccatgtcgcgcctcccctctccgcttatcatatcaccaaaacacgcggtaaaaaagcaccctctgatggggtgcctattttttcagcacaagctcctgaatcgcatgcgccacgccgtgttcgttatttgatttcgtttcaaaatcagcaatctcccttacttccgggatggcattggccattgccacaccgcagccggcccactgaatcatggacatgtcgttgccgttatcgccgattgccatgacgtctttctgttcaatgccgagtttttcggccagcagcttgaccgcgtttcctttactgactttcgggtgaagaatctcatggaagaatggcgcgcttttgaccattgtgtatgtttccctgaatgattccggaatggaagcgaccgctttctccagcttgtccggatcgtcaatgaacatgactttcggaatcagaatatccttcggcacttcatcgatcgtgcggaaatgaagcggcactttcgtaatgtatgattcatataccgtgtattcactgatatcccggttcggcgtgtacagattggctgtgtcaaagtaatgcatcggagtatccagctgtaagctcagctcgtaaagcgacttcaaatcttcaaagcctaatgactgctcggccacgacaccgtttgtatacgtattttggacgagtgcgccgttataggcaatcacaaagtcgccttcttcctgtaagttcagctcttccaaataccgacgcacgccgccgatcggccggcccgtgcacaggacgatattgaccccttccgctttggcggcatcaagcgccccgcggacttcagccgtcacttcatgatgatcgtttagtagtgttccgtccatatctattgcgattaacttgtacatcctgcatctcctttgtatccttttcttcttatgctttcatcatatcgttttttcgtttcaatgaaaaatcaaacggacaagtttctccgccttctcttcgtataccggacctgcctccggatgcggggccgtcttttccccttgtcagcttgttcgccgccgtcatctgttttctgcttcaagagcatcagccccgccgcaaagaaagggacggccgctatgtccagaagggcaagctttattcccatcgctgcgggaaagtatgcccataatgaacggctgttccgcctgatcatgatataagaaacgatttccagcaggataaacagagcgttcacccacaagtaaatgagcattgccgcaaacagaaacagcaggagcgtattccgcagcgtgccggaaaacagaagagcgcgcatcatatcaaagaatgaaaaagactgcatgcttccgttgacgacattgggattgtaaatggtaaaacgcccgaactgatcaaaaagcataaaaaataaccataacagtgaaaaccattgaatgatatgtacgatgacacccgtcaaaacgagtctgtcggcagccttatttctcatgtgcatcctccccgccggtttttattcttgtcattgtttttgtttctccgtatatcttccaaatgagcgtaccgttttttcctcttttcaacgtgcttttgacggggtgcggatggccgaggtattcaatctcgatcgtcccgtccgtgttctgagagatcaccttgtacacatctgagggcatggcaacctcgccgcggccttgaatgacctgctttgtcagcacgctgtctttcgtaaacgtgacggtttcagatctgaccccgtccatcgggcccggtttcagccctgcatcccatgtcccgtaataaaaaggggtatcgtctgctttcttttgcgagcagcctgttatcatgacgcatccgaaaacaagaaccgtcatgatgaaaatccgtatgttccgcaacatgatcaccttcctttgaagcttttttacgcctgtaacttaggcggatgccgtggcactgtgcaattgactacatagtgtataaagacttcactagataaggagaatgatgaatgaacccatatcagtactacaccccgcctgcctatttccctcagcagcaggaatacgaagtgaaccgcgttgagtatgagccgtatcagcagcaggaaagctattattatgcgccccctcagtccgaagagcggcagccgacaggtttagaacggagagtcgcccagcttgaaagacaaaacgccgagcaaacgagagagctcacccgcctctcacaagaagaccagcgccaaaaccgggaaatcacgcgtatgaatgagcagatcagacggctgagccagtccattgaaatccatacccgccgcttaaaccgtttgaatcagcgcctgcgcgcagtcgaaaacagactcaatattccttttcacgctacagaaggcggcttctgagaaaaagggccggaatacaaagctcaacaggccatcccgagccttgtattccgctctgtacataacaggtaaatatttgaatcctcttcttccatgaatgcctctcctattctttcacatgataaatgtgtaaaatcaatcactccaggaggtcttcatgatgtatcaaaaccaatacagcggaaatcagctgcagcaatgccgccaaacagcacagcagcttattcagcagacacagcaaagcagtcagcagtacaagcaaatgcttcagcaggaacagcaaaacattcaaatgcttcagcagatgcttaaccatgaacagcatgccgttcataccattcagcaagcgctgcaggggcatgaagcggccattcagaaatgccagcaaatcgtgaatgtgtgcaatcagcttcagcaggaagtaagcggacacatgcctgcaccgatggcaaacgctaatgtttcttcattcccgcaaacacagcatcacacaccgtttcagcagcattcataccagcaataggccggtcatgcaaatgacaaagcgcgagataccggctttgtcatttgtttttatctctgttttgtcagatcaatgcgatgagcgggttttccgccgaattttgcttcagcctcatgccttaccgcttcaaacgctcttgcttcgacgttttgtttaaacacatcaagctgtatcaaataagccgcccgcactttcagcccgtggatgatggagatgacccataaaggcagcacgatatacacgcccggcgtgctcggcagcacaaaagcaattgctaaaataataaaatagataagtccgtatttcagccattttttgttcttagcccggtagccgatatagaaaaaggccaagaaagcggtcagcgcaaacggcgcgaaagtcagcagcagccaccagctgtgcagcacttcccaccaagttcctcttttcgtaatcaacattcattcctcctcctttactactataacatggataatcaaggaaggttttctataaaaaacatagacggaatgacgtcttcctgctatattaataatgataatcattatcactgaaatagggggatcattatgaagaaacaatcatggctgatcagcctggcacttctgcttgttttcgcattaagcgcttgcagcggcgcgaaggaaaacaacggatcggcatcaggcaaaggaaagacagacatgcgtacatatgaatcaacaaaagggaatattgacatacccgcacatccgaagcggatcgtcactgacttttatgcaggtgagctgctgtccgttgacgcaaatgtcgtgggggcgggctcatggactttcaaaaatccgtttatcaaaaaacagctgaaaaacattactgacatcggcaatcccgtcaatgtggagaaagtgatgcagctgaagcctgatttaatcgtgctgatgaaggatgaccaatacgagaaactatcaaaaatcgcgccgacgattgtcattccttttaacaccgcaaagaatacgaaagatacggtcagcctattcggcgacattgccggggcgaaggataaagccaaaagctttatggcagacttcaacaaaaaagccgaagccaatcaaaagcgcctcaaaaacgtgatcggcaaagacgagacagtcggcctttatgaaacgacggataaaggcgaaatctggattttcaatgacaattccggccgcggcggccaagccgtttataacgcgctcggattgaaagcgccggccaaaattgaaaaagacatcatgaaaacgggcgccatgaaacaggtttcccaagaggtcatccctcaatatgcggctgattatatgttcattaccgattacaatccgaatggagaaagcaaaacatttgagcgtctgaaagattcatccgtttggaaaaatctcgatgccgtaaaaaacaatcgtgtctttatcaacgatttcaacactttctatccttatgacccgattgccgtcagcaaacagatggatatcatcaccgacatgctgatcaaacgggctgaagaaaataaaaaataaaaaaagcggcacagtcatgacactgtgccgtttttcctgttcactttaattttgactgtacggagcccggcatatcttcaaatctgatttcttcccaggtctcgacatattttcctttcgccttcactttcaaatacgcgttcttccgaagatctttcccggcgaaaaaggtcacttcttcttttttcccggatgcattatatccgtctaatgtatactcagtaccgcccgggctaagatgtttgccatctcgatcaatctgtacataaacatcttgctggtgaataaacggattaaatctgtctgtaacatcattatgaaaaaagagaagtccgtatatgacggcagcggccgccaagacggccaggattgccaatgcttttttcatctgtgcactccccttacttgttcatttttttcaaatagcttgaccgcactgtgaggaagaacagaagctgaaagatgaaaaaccctccgatggtcagactgagcggccccgctacatcggaatagccttccacggccaatgttctcaaggcaaacagcgtatgcatgacggcaatgacgaaaggaaagaaaaagagaatcgccaattgtatcgtcacgctttgtgccatttcacgctcactcaggccgattttagccagtgaacgatagcgctcccggtcctcatctaaatcagtgaacagcctgaaatataagaaacttgctgccgcgacaaagaatacaattgcgataaacaggccgataaataaactcaggctcggcagctgcaccgtatcatagtacgtcccggcttttgccataaaatcagaatgcacgtcgatatagttgccgtaaatctcatttttcaaggattggctgatcccaagactgtctttccaatgatcatagctgtagccgtataatgacgctttttcaccgagtgatttaagctgatcaaaggtttgatcgttcaccgcgatgacggcatttaatgaaatcagcggtttttcgacttcttttaccgtcagtttttgttcagacggcttgcctttttggttcagcagcttcagctgatccggcgcttcgtttttgaaattgcggtcatacgtgcccgggaaatagacagcctcatcatgtttcaggccgctcagcttaacatggaagtatgttgacacatccgattcgctgatcatgtaaacaggcggaacagtatctccttcctgatagcggacataggaaacatttattttgtctttcttatacgtaaagccgtgtgttttcagttcatggtcaatatctttcaaatgagtcttttcttttggattattgctgtaagatacatactccatctcataggcggactcttccgccccgacagtcgatttgtacattgcgagcacgcctgtcgcagtaaacgcaaccgcagaaataatgctgacgataaagaacaggcgggcgttgtcttttaaacgataaacaagatcagaaacccaaatgacatttttcccgcgcagataaaaggttttccacttcttcagcgcgcgcagaatccagatgctgctttggctgaaaaagaaatacgtaccgatgacggtaagcagtaaaatgatgaacggttgagtcccgtggacattgcctttcagaaccatgccgtacccgccgcacaggcaggcgatgccgaataatgacagaagcacggacggcttcggctccggcttaatcttgtcagtaccctttattaatttgatcaccgtatttgatctgacaaaaaggatcgtgaactgcgataaaaggaaaaataagagcagaaatccgccggccgtaatgccgagcgctttccaaggcatgtacagaggcagcgcgtccatttctaaaatataagcgccgaccgtaaagaacgttttcgaaaaaatgaagcctccgataatcccggctgcgatcgacataacgccgatgatcatgttttccgccgtaatgagctttctcagctgccccggcgtaattccctgcatcagcaggatgccgaattctttatttctcgatttcaaaaatgcattaaccgaatacagaacaaataagaaagaaaaaacaaagatcatccattccgcggcggttaagccttttctggcgatgttattcaggtagccttcctttaaagccggatgaaacaggaacatcgcaaaggtaaagaaaatcaaaacggaaaaagcgctgcttaaaaagaaggcaagataggcccttttgtttctcgtgacgtttttataagcgaactgaagaaaggtcatttgcgtttccccccagcatagacagcacatcgagaatctgctcataaaagacttggcggttttccccgcggtaaatctcattaaacagttcgccgtcttttataaagatgacgcggcggcagtagcttgccgcaaccggatcgtgggtcaccatcaaagccgtgatatgatcatcctggttcaggctctgcatcgtttccatgacgtcttttgacgctttggaatcaaggttgcccgtcggttcatcggccagaatgagtgacggcttatgaatgaccgctcttgcgatggcggcccgctggcgctgtccgccggatacttcaaacgtccgtttgttgagcaggtcttcgattccgagctttgccgcgatgccgtgcagtttttcttccatgacagacggcgcttctttttcaagcgttaacggcagcatgatattttcaccgattgtcagtgtgtccagaaggttgaaatcctgaaacacaaatccgagctgcttgcggcggaaatgagcgagctttgtccgcttcaggcgatgcgggttttctccgtgaatcaggatatcgcctgaatccggacggtcgatcgttgaaatgatattcaaaagcgttgtttttccggacccggacggccccatcaccgccgtaaacccgccttcttctattgaaaatgaaatttgcttcaaagcttgataggacacttgtcctttataggttttatttatatgtttgacttcaagcatattcgccatgaaaatcctccttatggttttattcttgttgatctggactgctttcatgtagtgccggggcgttcagcataaaaaatccccttgacataaatccatgttatcaaggggaaacagaatgagctatgttgttttcttaacgcagtcttacatttttgtaagaaatgaaaatcggaccgatgtcccttcacccggggacgagctgatgtccaccgtatgattgagcttgcccgtaatttctttgacgagatggaggccgattcccgtagattcttggaaacgccgcccgttttcgccggtgtaataagggtcaaacacccgcttgatatcttgcgagggaatcccgacaccgtaatctttgacttcaagcaccgtcctgtcttcatcgcggaagacattcagctcaagtctgtcactcttgcccgctgaatacttgaccgcatttgtgaccacttggccgatcgcaaatttgagccattttgcatcggtgtaaatctgatgatcatcgcgaatgtccattttcggatagacgcggtattgaataaagaatcgtttatagctttgaatgaccgattggagaagctctgataaggaaaccgcttcaattttaaaatccctttcaaacaggtcgagcctggaagaataaagaagcgtctccagcccgaattcaatctgccggacttcttttttgatttgttcaaaaacgggctcatcctcttcttgaatgattaaattaatgaccgacagcggcgtctttacttggtgcacccattgattcatatacgtcacccgcgcgtcgagtttggcttcggtctcatggagcttctggtgctgcagccgggtcagctccatctgcttttcatacagctctgaacaaaacactgaagaaccgagatacgggatgtccgtcccttcctgctccgagctgagccaatgatacacgccgcggtctttgtaccagcgataggcaagataccccgccaaaataagaagctgcacgcccaatatgtaaaacaggtgggaaaaagaatgaagacccgcaaaccagtaataaaagaagacaaacagcccttgaaggagaaaaagcagaatcagcacggcatgagaccggagaaacagcttcatgacagcgccctcagctggtagccttcgccccgcaccgattcaatcgaaataggcgcattcagctcccgcagtttttttctgagccgcgtgatatacacgttaagtgtattatcatcgacgaaaatgtctgtgtcccacgttttttccatgagccggtctcttcccgtcaccttttctccccgctccagcagcacttccaaaagcttgctttcttttttagaaagctcgcttttttcgtcctgaaagcgcagttcaaaccgttctacaaagagctgcacaccggcatattcaaccactttctctccctgctttgcggcgtactctccgtatgccctgcggatctggcttttgattttcgccagcacaatatcgtaggaaaacggtttttcgatataatcatctccgccgttttcaatcgccatcacttgatccatttccccgcttctggctgagatgaaaatgatcgggcttgtagaatgctggcggatctggcggcaccaataatagccgtcataagacggcagattgatatcaagcagcaccacatcaggcttttcccgcaaaaaaacatcaagaacagccgtgaaatccgcggcggccactgtttgatatccgtatttttcaaggtaattctgcaatagtccgcgaatgtcttcactatcttccacaatcatgattttattcaaactgaaccactcccgtttcttacactgctgccatcatcataatcgtttcgggcgtacgggcgcaacaccgcacaaaaaaaccgccatcttggcggttctgttcccatcagccgacctgctgttttatggctttaccggctgatccgaactctctcattttgcttcgcaccgtctcttccacggcttcaatgccgggtgtcatgtagccgcgcggttcgtacagatcgccgttttcctgaaacatgcggcgtgtttcgtctgtccaggctaccatacattccgtgttgatattgatcttcgcgtggccgagcgtgatggcttttttgacctgatcctgcggaatcccggatgctccgtgaagaacgagaggaatatcagtcatgcgggagatagcctccatttctttaaatccgagattcggctcgccctgatatttgccgtggacggagccgagggcggcggccagcgcatcgatattggtttctttgacgatccgctcacattcggcgatatcggcatagcggaccccgccgaccagcccgtcttccatgccgccgaccgtgccgacttctgcttctactgagacgccgtgctttgcggcatagtcggcgacttcttttgtcatcgcgatgttctcatcaatcgggtgatgggagccgtcaatcatcactgagctgaatccggcgtcaatggcctgtctgcagcgttccgcactgcttccgtgatcaagatggagcacgacgggaacggtaatcgccatttcttccattaacgcgccgaccatggcggaaatcgttttaaatccgcctaaatagtcgaccagacgatcggaagccgcggcgatgaccggcgattgctccttttgcgccgcctgcagaatcgccttcgtccattggaggccgttgatattaaattggccgactgcataatgctcccgtttcgcttctgcaagaagatgtttcatggtgacaaaagccatgttcacgcctccttcatgaagtattttgatacgacggcttccgttgtttcctttgccgttttgatcgtttcctccgcagtcagcttataatattcaggtctgaacagctctacggagacaacatcattgaatccgatttcttttaacgctgatagatgggcgtctaagtcaatcgcaccctgaccaggccagacgcggtcttcatccgttaaaaagccgatcgggaagtcttctgtatcgtcgatatgatagatgaaaattttctttccgtccgcctgcttcaaactctcaatattggagcccatcgcgtggaaatggaagctgtcaaacaccagtccgacattatcgcggccgacagcgttcacgatgtcatacgcctgttcaaatgtattgaccgtacattgcgggtggccgacaaattcaagggcaatgtttacgccgtacggctccgcgatgtccgaaagctcagtcagcacctctgcgctgctctttttgatctcttctttcaagattttccgctctgtcacaagcggcacggccaccacatatttcacaccgagcgtcctgcaggtttccatcatgcttttgaattccgaaatgatctccctatagcccttctcatcacggttgttgaagaaaaccagtgcgttcagggcaagcggtttaatgtgatgggttcgaaaatattccgccagatcggccagtgaatggtcttttaagtattccggcagcttatccattgtgcggatttcaatataatcatagccgtgcttttcgcacagttctaaatcctgtttcaggtttgaattctccagcgtagtcgcttcattaaagcaaagtttcatgtcagcctctcccatccgcgttttcgatatgaagggagtccggctggagggcttttttgccccgttccgccgaactccatactcagcttatgccatacccagttcttcctttaatttcttaagcgtggtccggcttgattcatccgctctttcgtcgacccaagcaaaaacagcgttcgtcgcaattccgtcgaatttcatctctctcatctttctgaaaatcgtctcaaaatcgacctcgccttgcccgatgtccaaatgctggtgaaccgttactttcgcatcaggcggattgacgatgtaacgcaggccatgcgccgctttatgattaaaagtatctgcaaataaaacatgtgtgaggcggtcggcggcttcatcaaacatagtcgcaatatcgccttttccgtcatcatagaagaacgtatgcgcagtcgagtagacaagattgatccaatccttgtcaagcgcgcggatcatatccatcgcgcctttgtgcgtttcgataaaatcatacgggtgagcctgaagattgagtttaacgccttctttttcaaagacgggcagcagctcatccatggatttgatgaatttttcttcacttgtcaaaggatcatattttgaaccgctgaattcactgttcatcaaatccacttcaagttcaaccgcaatttcgatcgcccgtttccagttgcgcacggcggcctgacgacggtcttcatcaggacccgcccagtggtaaagcggaagaagagaggacagcttcacacctgtatcctttaaaaggcgcttcaattgtttgatttttgctgaatcgactttcggatatttatagaaaggacaaaaatcctcgcgcggagacagttcgatatattcgtatccgagttccgccgttttatagaccatttcttctaacgttaaatcatcgcggtacatggatggatctaaggccagtttcatttctttcactcccgatctattatttgttcacagtcgtaaatgattggtagaatgccggtttctcttgcagcgccacaggctctttctgcccggattcctgagcttttacgcacgcgtcagttgtcaccgcggctatataaccgtcccatgccgtcggaccgctgacttcgcctttattccggatcgaatcaatgaagtcttgaatttccacatcatacgcagccacaaatcggcgctgccagtccatcaggatatcggtgctgaatttcccttcttttctcaagctgatgcttgacggttccggaagcttgataacgccgtcttccccgacgatctcacattgaatgtcgtagccgtatttacagttcacgtagatttcggcattgatgacgatgccgccttttgtttcgatgatgaccatctgcggatctttcaaatgcggcagcgcattttttgatttcttcggatagatgacctgtacggattcatagtcgtcattgacgagccagtggaggacatcaatttcatgaacgagcgtatcgacgacggccatgtccgttgaataattcgatgcgactgtcgggttgcggtgcgcacagtgaatcatcagcggctcgccgaccacgcggttgtcaatcgcttctttcagctgaacgtaaccgctgtcatatctgcgcatgaaacctacctgcaccaatcgttttcccgtcttcatttcttcctcgacaatgcgcatacagccttctgccgttgtcgcaagcggcttttcacaaaacacgtgcttgccgtgctgaatcgctttcaaaacgctggactcgtgagccgggccccagcttgtcactaagacggcatccacattttcagcagcgaggaggctgtcgtcatcaggataaacggaggcgttcaaattgaaatcctgaacggtctgctgcgcggcctcctgattcacatctgtgacagcggtaatttccgctccggacagcttatttgtgatgcggttgatgtgctcttttccgatagcaccggttccgataacacctatacgtaaattcattgatcgccactccttctgataatcaaataatggttctcgtccttcttttcccgctgccgtcctgaggagcgccgtacagttcctcctgtatctgttcaagcgacatgccggacgtattcggcgcgaagacaagcccgatgatcatactggccgtcacacatatgagcagaataccggccataaaaccgatgccgaattgtgacatgatgaccggcacaaataaactccaaattccgattgaaatacggacgagaaagaacatgagcccttgtgctgacgctctgtgttctgtcgggaacagctcgcttgcccacagctggtagttcgcctgctggccggctccgttattgatgccgatcgctaagacaaacaaaagcagcatcgggagcccctgaaacggcagtaaaaacagcgaccagccgacaacggccatacatgcgcagattccgaacaccgttttccgatatttatctgcaaaaggcatgaagatacaggcgacgccgagcccggtgaagataaacagggccatctgcagaatgttggccgtatttgcggatacgccggcgacctgctggtagatgtacggcatgaagaatcccatgacgcccgctgcgagattccatacgagaaacacacccattaaaaacaaaatgttcttgaaaaatttcggctgaagcaggtcaaaataagatgtttttttcacggcggcaggccgctcttcactgtttttccaggcatccgactcaggtaaacgctttcttatcacatatgtgataagggcaatcaccaatagatgcgcaaagacaattttatttcctaaaagcccgaggtcaccgaccaaaacggataacagcagaaccacaacggctcctgcggcccacgccacctgcgccactccgcaatgcctcgcccggtttttctcaggggcgttttccgcgataatggtccatgaagctgtaatatccgcgcctacagaaatcccgataatcatgtatccgcataacagcatgggaaagttgaatccaaacaaaaccaaacaaattcctaaggcgtagacgagcatactgtttgtgtatacagcttttcggccgaccttatcagccaaatacccgccgagcagcgctccgatggccgctgatatcgcatttgcgctgaaggcgccgagcaatccgatctggctgtcggacagctttaaatagctgacccacatagataaacccgctgatcctgccacgatggaacccgcatcaatgtaatttgctaatgctgcggcgatggtccttttgctgaaagctgattccgccttggcactattcatataagtccccctctaatttgcaggatcaagcagttcactgtcgatatactttctcgcaatcagcgcgtactcaagcggattggcgactgccgggtcttgttcggcttcgatgacgatccagcctgaataatcatgacggacgagcgttcggtatacttcggtaaaatcgatgcatccgtctccgggaaccgtaaaaatgccctgtaaaaacgactgcctgaatgacttgccttcctgtctgcaccgctccataatgtcaaaccgcgcgtccttgaaatgaacgtgtctgatccgatccatatgcttgttgagaatcgtcatatagtctccgtccgagatataggcatggccggtatcatatagtaaatggacataccgcgggtccgttccatccatcagccggtcaacttcttccgccgtctggacgcctgtgccgagatgatgatgaaacgtgaggtccagcccgtattcgccagcgattttcccgagacggttcaagccttggcacagcgtatcccattcttcatctgagaagtgcggtttttccttaaatacatcaatatccaagccctgaacgctgtacgtctgttcagaaacgatggcgacatccgctccgactttctgcaaataatcacagtgttctgtaaattgttcagccgttttttcaataccgtcatatatgataaagctgctgaaccatttccccgcaatccgcaagttccggagagccagctccttattgaggacggagggttcagggaaaaaccctcccacttccgtaccttgaaagccggcgacaacaatatcgcttaacaaatgctgcagcgtattcccggctccgatttccggcatatcgtcattgcgccacccaatgggagcgatgccccacagaatatcttgtttgcccatcgtgatgcctcccctctagtactgctttgcagacttcagcttcgtctctttcgcttcgtatgcccgctgaacgctttcctgctccgacacttccgccacgccgacatgccaccagctgtcatagccgtccgtcatcgttttcggcagaactttcatttcaattaaagtggatacgtcttgcgttttcgcatcttcaagcgccgctttcagttcttcaaccgtattggctctgtatgttttagcgccgtagccctctgccaccttcgcgtaatcaacgtttaaaatctgattgtcctctgtgcggaactcgcagaaataactgccgctcccgtgatccatctgcaggttgttgatacagccgaatccggagttgtcaaaaagcaggacattgatttttttgttatattgaagcgcggtaatcagctctgagtgcagcatcagaaagcttccgtcgccgacgagtgaatagacttctttgtcgggatgggccagcttgaggccgagcgtgcctgatacttcataccccatgcaggaatagccgtactcgaggtggtacgtattcgggacattggaatgccacagccgctgcagatcccccggaagagatcccgccgaactgatgacgacgctgtcttcaggaatcgtgtcattgatggtcaacagcgccgttgtctgcggcagctcagtcccgagcgcgtcggcatactcgtttaacacgtcctgtgaaaaatggttcttaatttccggttcaaacgcgtcacgtgtaaaagtgaccttgccgagccggtcccgttcagcaagccattcatctttccagtctttaatcgccgtgccgaatgcacttttatatccgtctaataagccgtgcaacctgccgagcgtcactttcgcatcggctacaacctgaaacgcgtcaagcttgtaagcctgcatgcggctgacgttgatattcaaaaattttgctttgtcaaaatcaaacgccgttttcgaggatgtcgcaaagtccgtgtaccgtgtgccgacaccgatgatcagatcagcctggcgggcggctttgtttgcggcgagggtgcccgtgatgcccatgccgcccagattgttggcgaaatcggcttcaaccgttgacttgccggcctgcgtttcgacaagcggaatgccgtatgtttcagaaagcgcgattaattcctcacgcgcgccggagtacttcgcgccgccgcccactaaaatgacgggacggctgctctgcttaattctttccgcggcgcctttcagctcacgctcgctcggctgcatccggtcaatgtaatgaacgcgtttttcaaagaagctttcatcaaaatcaaatgcttctccctctacatcctgagaaatacagatggtcgccggacccgcttttgccggatctgtcatcacttcaaatgcccggattaagctgctcatcagctgctcgggtcgggtaatgcggtcccaatagcgggacacgggctttaacgcatcgtttgtcgtgacggcggcactgtattcctgctccacctgctgaagcaccgggtcaggctgcctcgtcgcaaaggtatcggccggaagcagcagcaccgggatattattggccagcgccgtacccgcggcagccgtcaagttagcggcacccggaccgaccgatgtcgataccgcgtaaatttttcttctcagcatctgcttgctgtatgccaccgcggcatgcgccatgccttgctcgtttttgccttgatagactttcaagtgcccggcgtcctgctcaagcgcctgcccgatccccaacacatttccgtggccgaaaatcgtgaagatgccctcaacgaacggctcttcttttccgtcaacatgaatgtactgccggttcaagaattgaatcagcgcttgtgctgtcgttaagcgaattgtcttacccacaaacgatcccaccttttatacgttctatttaccgttaagactgtgctgcgcttcaatcagttcgatgatttcaccggcagccggcattgcttctgaggagctgtgtttgctgacgacgatggaagcggaagcgctcccgtattttaaagccgtttcaatatcccggccgctgacaagtccgtagatgaaggctgacgcataggaatcacccgctccgaaggtcttcagcacctttgttttataggcatgcgcccggaaaacttctcccgatctgctgtatgcgtatgatccgtcaacgccgtgcttaatgacgacaaggtcagcggagtgcgcaaacaaatggcggacggtttcatcgttatctccgccgctgcggttttccattacgtcaaattcgtcacgcgtaccgatgacgatatcggattgttccgccaccagcgtgtagtacacggctgtttcttctgccgattgccaagtatacggacggtagtcgagctcaaacacgacttttacgtcatgtttttttgcgatatgcaccgcttttaagacggcttcgcgcgacgggcttttcgcaagcgccgtacctgatacgagcagcattttcgcgtttgcgatgtagccttcattgacttcggacggctcaagatacaaatccgccacgtcatcccggtacatcagaatgctgcactcttccggactgagaatttccgtaaaagcgagcccggctttacgcccttctctgtcaacggtcatttgtgacgtatcaacgccctttccctgcatataagaaacgatgaatctgccgtgctgatcgtccgggattttgccgataaaaccggcttttaatccgagcttggcgctgccgatcgcaatatttgccggggagccgccgacatatttagaaaacgtcatcgtttcttccatcggccggttgtattccgcagcgttcaaatcaatacacgcgcgtccgatcgcgacaatatcaaactctttttcttcattaaatgtatatttcatcgttatctgccactcctcacttgttagcgttccaggatccattcatgggccggatcattatgaaacttccattttcgtgtcggtcccgccattacattcaggtagtaagaggtatacccgtccggaacaccaaccgggtgatagcccgccggcacgatgacaacgttttcattttctgcggtcatcgtctcgtcaatcgagcggtcgtccgtgtacacacgctggaagacaaacccctgcggcgggtccgtttcatggtaataggtttcttctaaaaaggattcagccggcagattgtcttggtcatgtttatgaggcggatagctcgaccagttgccgctgtccgtgtaaacttcaacaacgagaaggctgtttgccaatggatttgaatcggggagaatgttatgaacggttcgtttgtttgccagcttgccgcgatgttccacaccgttgtcttccgctttaatcagctttgtcggaagctggtgttcggacggagaatagcacagcgcgaccctcgccccgctgaccgctgtgatttcaaaagagcggtcattggacacataaacgctgtccgtcggttttctttcaaatacgctttcacgggtgccgatgctttcaaatgtctgatcataatcagtgacggtgatttttcccgttaccgcaacgatgcagcactccgtctttttcaaatcttctgtatatgcggaaccgggagtgaggtcaacgactttgaatccgacgtatttgaggtctgaattggctgaagtgacgtcatgtatgatgttcacgccttgagaaatctcatcggcctgcggtttgcgcagcaaatgactcatgtttattcctccttaatggatggtaaaagaaaacccggacggaatcacaaagccgtccgggccggctgtcagatcaattgaagtcaggagacgggtatcgtgccgtcacgacttttttacgtgtatagaagtcgacgctgtcttttccgtttgcgtgcaatgtgccgaagaaagaagacttccagccagagaacgggaagaatgccatcggcgccgggacgccaaggttgatgccgagcattcccgcgtcaatattctcacggaagtagcggatcgcgttcgcatttgaagtgaacagacacgcgccgttcgcaaattcagactggttggcgatgtccaccgcttcttttaagtttttcacgcggatgaccgacagaacgggcgcaaagatttcatctttccagatcgtcatatccgtcgtcacgttgtcaaaaatcgtcggtccgacgaaatagccgtcttccgttgcgttttcacgcccgtcacaaagaagtctcgctccttcttcgatgcctttttcaatatagctgtgcgtgcgttttttgttgtcctcgcggatgaccgggcctaagaacacgccgtcatccagtccgtttccgatcttgatgtccgctgctttttcctgtaatttcgaaataaactcatcggcgattccttcttcaaccgtcacaaccgcgcatgccatgcagcgctctcctgccgaaccgaatgccgcgccgataatgtttgcgaccgtatcttcaaggtgggcgtcattcagcacgatcgtatggtttttcgcgcccgttaacgcctgcacgcgtttcaaatgttcgctgccttttttgaaaacatactcgccgacaggttttgaaccgacgaatgagatggctttaatatccggatgttcaagaacgccgtttacgacgtcatgcgcgccgtgcacgacattgaagacgcccttcggcagaccggcctgttcaaacagctctgccagtttttccgttaacagcggcgtgcgctcagatggcttcagaatgaacgtatttcctaacgaaattgccatcgggaacatccagcacgggaccatcatcgggaagttgaacggtgcgataccgccgaccaccccgatcggatagcggtagttcgccgcctctacatccgtcgcgatggaggcgagtgaatcgcccatcatgagtgacggcgcgcccgctgcgaattcgacgttttcaattccgcgtcccacttcaccgagtgcctccgtcgtgtttttaccgttttccaaagtaatcagacgggcaagctcttctttgttctgctggagaagctgctgatagttaaatagaattctcgcacggcgcggcactgccgtctttgaccatgtttgaaacgcctctgacgctgagcggacggcgtattccacatcctcccgcgtagaaatcggaacctggcacatcacttcttttgtagccggattgacaacgtcttcatattgatctgtcttactttcaacccattcaccattgatgtagtttttcagttttctgatctctgccattctcattgcctccttaaatagtaaacatcctgttcagctggataataacggatgaatatattcatcttttacatataaaagacatgaattaaacgcttacaaatgctaaaatgatggtgactcccaatctttccatgtaaaagttggtcatgtgccggaaaaagcaaacggttacatctttcacttttgattttacaggttatgttttggtaatttcttggttacattgtaagcccaacacatcttcaagtcaatctaaaaaatcaaaattttttcattatttttatcatactttttttgatcgggaaaacaggaacttggagaaccgtgtcgaatcggaggggatgatccctcttttttatcattttttaagtaactattgattaacttctggtgtttattatatattttaattactttaagaattctagaaggagtttttttatgaaactgatgcggattcaggagatggaagaatacattctcaaacacggagccacttcgctggatgagctgtgcgaggtattcaatgtctctaaaaacacggtcagacgcgatattaataagcttgcggaaaaaggggttatcaaaaaggtatacggcggcgtgacgtcagccgaaaaatctgtgctcgtcccttttgaaaaccgcaccattcaacatcaggatgaaaaaatcaaaatcgcccgctatgcgtcacggtttatcgaggatcacgatcttgtatttattgattccggcacgacgaccaaatcgatgctggagacgcttgatcccgataagaatgtgacggttttgacgaacagccttgatattattaacgctgcttcatccatgaaaaatatcgacctgatcatcatcggcaataattacaagcggaagacaaggtcgtttgtcggcattgatgatcggagcacactcaataaatacaacattaacaaggcgttcatgtccgctaccgggacaacgatcacccacggcctgacgaattccgacttactggaatacgaggtgaaaaagagaatttccgaaaaggcgaacgaagtgtatctgctcgcggatcattccaaattcggcaaatccacgcttttgacatacgcgcctttcgaccggcttcacagcattgtcacttctcagcagctcgatgaggaatatacgaagtattgccaagagcatcaaatcgacattcacttggcatagcgttatagttaatagagaacgctgccgtatttttccggcagccgctatgatatccaattttttcagggggcgaaaacatgagcaaagtaacaatcggcaaaactgacctaaaggtatttccgatcggtttgggaacaaatgcggtcggcggacacaatctctatccgaatctgaatgaagaaacgggaaaagaattggttcgggaagcgattaaaagcggcgttaccatgttagataccgcctatatttacggtgtgggacgttctgaagaattaatcggcgaggtgctgaaagaatgtaaccgcgaggatgtcttcatcgccacaaaagccgctcacagaaaagaaggcgatgactttgttttcgacaattcaccggcctttttgaaacaatcggtcgaagacagcctgaaacgcctgcagactgattacatcgatttattctacatccatttcccggatgagcacacgccgaaggacgaagccgttcaagcattgaatgagctgaaaaaagaaggaaaaatccgttccatcggcgtatccaatttctctttggaacagctgaaagaagccaataaagacggcttagtcgacgtgattcaaggagaatacaacctgctgaaccgtgaggcggaaaagactttcttcccttatacgacagaacacggcatctcattcattccgtacttcccgctcgtatccggactgctggccggcaaatacgacgagaacaccaccttccctgaaggcgacctgcgcaatgatcaggcgcatttccaaggggagcagtttaaagaaaacatcaaaaaagtcaaccagctcaaaccgattgccgaaaagcacaatgctgatacggcgcatatcgtgcttgcctggtacttggcgagacctgaaatcgatatcctgattccgggcgccaaacgcgcggatcaattaaaagacaacatgaaagcagcctccattacgctatctgctgaagaaatcgcgtttatcgacaagctgttttcctaagaaaaaaacacgcctcttaaaaggggcgtgttttttttatgtttatatttttctcttcggggaatgaaatagttatctaaataaactattatgcgttccaaaagatgaggaggatcatctgtgaagaaaaacaccaaaaaatacctgatttactttttcggagcattaggcgggctgctttacggctatgacaccggtgtgatttcaggggctttgttatttattaacaatgatattcctttaaacacgctgaccgagggattggtcgtcagcatgctgctgctcggtgcgattttcgggtccgcattaagcgggacatgctctgaccgatggggccggagaaaagtggttttcgtcctttcactcatttttattatcggcgcgcttgcctgtgcggcttcgcaaaccgtcactatgctgattatctcccgtgtcatactcgggttagccgtcgggggctcaacggcgctggttcccgtttatctatctgagatggcgccgacgaaaatacgcggaacgctcggcacattgaataacttaatgattgtaaccggaattttactcgcatatatcgtgaattacatattcaccccgtttgaagcttggcgctggatggtcggtctcgccgcagtaccggcggcgcttttattaatcggaatcgcgtttatgccggaatctccgagatggctcgtcaaacgcggccgtgagcaggaagccagacaagtcatggaaatgacccacgacaaagaggatatcgctgttgaattagcggaaatgaaacaaggtgaagccgagaaaaaagaatctacgctcggcttgctgaaagccaaatggatccgtcctatgctgctgatcgggatcggcctcgccatcttccagcaggcggtcggtattaacacggtgatttactatgcgccgaccatctttacaaaggccggactcggcacttcggcgtccgttctcggcacgatgggcatcggtgtcttaaacgtcatcatgtgtatcaccgccatgatcttaattgaccggatcggccggaaaaaactgctgatgtggggaagcgtcggcattaccttgagcctggcgtcactatcagccattctccttctggccggcctgtcagcttcaacagcatggctgaccgtgctgtttctcggcatctatatcgttttctaccaggcgacatggggtcccgtcgtatgggttctgatgccggagctgttcccgtcaaacgcacgcggagccgcaaccggatttacgacattgatcctgtcggcaaccaacctgatcgtttcactggtattcccgcttatgctgagcgctatgggcatcggctgggtattcggaatattctcagtcatttgcctctcatccttcttcttcgctgcttacatcgttcctgaaacgaagggcagaagtttagaagaaatcgaaacgcacttgaaaaaacggttctccttaaagaagcgcagcaaacaaaatcaaattcttaaacagcgcacactgtaataaaaaaaggaatcgcccccgctgggcgattcctttttggcgtcataccataactttgcaaatgtcattcgtaaattcgaccggatcatggatcggcagcccttcaatcagaagcgcctgattgtagagaagatttgtgtataatgcaagcttttcccgatcttgtccgtgcgcgttctttagcgtctcaaacacttcgtgattcgggttgatttccagcactttttccgctttgacctgctggctgtcaggcatagcattcaacactttttccatttcgatcgtcacttcgccgtctgtcgcaaaacagaccggatgagattttaaacgtttcgacgctctgacgttctttactttatccgcaagaatctctttcatgctctcgaacaggtctttatattcgttttcttcggcttcagtctgcttttcatcctcatcactgtcgatgcctaagtcagcgctggatacggatttgaactctttttcctcatagcttgtcagcattttgatcgcgaattcatcaatatcttccgtgaaatataaaatttcgtagcctttgtccgccaccatttcagtttgcggcagcttttcaatccgctcatatgaatcgccggacgcgtaatagatatatttttgatcctcaggcattctggacacatattcgtccagagtgacgagctttttctccttagatgaatagaagagaagcagatcttttaatacgtctttattcgcgccgaaatcattatagacgccgaatttcagctgtctgccgaaagattcatagaaagattcgtatttttcccttttgttcttcagcaggctcttcagttcggctttgatttttttattgatgtttttcgcaatcagcttcagctggcggtcgtgctgcagcatctctctggaaatgttcagcgacagatcctcagaatccaccatgccttttacaaagctgaaatggtccggaagcaggtcggcgcatttgttcatgatcagcacgccgttggaatacagctccaatcctttttcgaattccttcgtataatagtcaaacggcatgttttccggaataaacaaaatcgaattgtagcgcaccgctccatcgacgctgatatgcacatgggtcagcggtttatcaaaaccgtaatgcttctcggcgtaaaaagcctcgtaatcctcatccgtcagctcgcttttgttttttctccagatcggcaccatgctgttgaccgtctgttcttcctgaacttcttcaaattcgttctcgctgccctctttcggcttgttgaccgtctcttccattttgatcgggtagcggataaaatcagagtactttttcacgatcgctttgatgcggtagttttctaaaaactcatcatagctttcatcttccgtgttttcttttatttgcaaagtgatttccgtaccgacggtttccttgtcacacggcgcgatcgtgtagccggcagccccttccgactcccatacatacgcctcgtcactgccgagcgccttacttttcaccgtgactttatcagccaccataaatgccgcataaaacccgacgccgaactggccgataatgtcatggccgtctttcgagtcattttcttgcttgaaagcgagtgaaccgcttttcgcaattgtgccgagatgctgttcaagctcgtcttttgtcatcccgataccggtgtctgtgacggtgagcgttctcgcttctttgtccgccgtcacttttatgtagtaattgtcttgatcaaacgttaatgaatcatcggttaacgccttgtaatagattttgtcaatcgcatcgctcgcgttggaaattaactcgcggagaaaaatttccttctgcgtgtaaatggagttaatcatcatgtccagcaatcgcttggattctgctttaaacttttttttccgcacttcagatctctcctttaattatgctttgatgttatgtaaaatcttttcagcatctatttatcatatacagtgacaattgtcaactaggattagcagatgcatatattgtaaatttaacatgttaatggattcatttcacccattttatcaataaaaaagagagaatgttgatcatcctctcctctctgcttctttccggcggccgaattccttcttcatccatatgtatgacgggtagaaaaacaaactaaataagataagagatcccaagtttcgcaaagactcatgaagaacatttcttacagtgagaggaaatatgatgtcctgaaatagaatagagataacggtgtaaatcacaaatcccataggaacaatggcataacaataaaacgctatctccttcttatgctgtatcttcaaaatatgtaaacctcccaatgatgtatatacataatattaacatatttaataggtatttagaaacaggcctccgtatgtttatccccctattcagcgggaacagatataaaaaaaggaggaatcgcaatatgggaagattaacagacaaaaccgcaatcatcacaggggccgcgacaggcatcggacaagcgacggcacgggttttcgccgatgaaggcgcccgcgtgatctgcggtgacatcaatgaaagcgaattgaatgaaaccgtcagcgctatcagaaaaaacggcggagaagcagaagcctttcaccttgatgtatcagacgaagaaaacgtaaagtcttttgcggacggcattcagcaaaagtacggaacaattgatattctgtttaacaatgccggtgttgaccaagagggcggaaaagtccatgaatacccggtcgacctgtttgaccggatcatcgccgtcgatctgcgcggcacatttctatgcagcaaatacctgattccgctcatgctcgaaaaaggaggctccatcatcaacacctcctccatgtccggccgggccgcagaccttgaccgctccggctataacgccgcaaaaggcggaatcacgaacctgacgagagcgatggccattgattacgccagaagcggaatccgcgtcaattccttatcgccggggacgattgaaacgccgctcattgataaattggcaggcacgacagaagacgaaatgggcgaagcgttccgtgaagccaacaaatggatcacgccgctcggccggcttggaaaaccggaagaaatggcagccgtcgcgctcttcctcgcttcagacgacagttcttacgtcacgggagaagacatcaccgcagacggcggcatcatggcatacacttggccggggaaaatgctgattgataagaagtggaaggaagagacggagtgacggtgaaaaagaaacaagccagtgcaaaaacactggctgaacaagctgagggcgggttacttaaaccagcccttttcttttgatcgggtaatggcttcaattcgatttttcacttctaatttatccaggatcatcgaaacgtaattgcggactgtgccgcttttgatgctgagggcgtttgcgatttcttttgtgttttttccgtctgcgacaagctcgagcacctctttttcccgttcggtcagcgggttttcctcactatagatgtcctccattaattcaggtgcgtagacgcgtcttcctttcatgacgctgcggatggcgctgacgagctcatcgctcgggctgtccttgagcatgtacccgctgacgcctgcttttagcgcccgctgaaaatagccggagcgggcaaaggtcgtcaaaatgatgatcttcacaccgctgtccttgagctcttctgccgcttcaagacctgttttcccgggcatttcgatatccatcagacagatgtcgggcgcatgttttaccacgaaatcgatggcatcctggccgcttgtgcctttgccgacaaccgtcatatcctcttctaaattcaacagcgaaccgagtgcgccgagcagcatttgctgatcctcggcaatgaagatgttgatcatctgctaccatccttttcttttgattttgaatcattcgggattctcatggtcagctttgttccggcggctgtatcgatggctaaactgccgtttgcgaattcaagacgttccctcattccaagcaggccgtgcccctttgaaaaaaagcggtcttctttgcattgaaagctgccgtcatcttccaccgtaatgacaacctctttccaaagctgctgaatggtgatgcggcatactttggcgccgctgtgtttcacgacattggtgacggcttcttttatgcacatgctgacgatgttttcgttcagcagagagatatgttttggcgcttctttttcttcatacacaaattcaattcctgccgcttcaagaatttgccgaacattgccgagctcatccttcaatcggatgcctttcatcgatgagacgatttgtctgacctcatttaaggaggtgcgggccgtctgctgcacgcttttcagctcagtgcgggcctgttcagggtccttgtaaatcagctttcgggcaaggtcgcttttcagtccgattaaggagagcttttgtccaagtgtatcgtgaaggtcccgggcgatgcgctgcctttcttccagcttcacaagatcggcgattcgctcatttgcatattctaatttctcctcaaggcgctcccgtgcctttctgcttcgaatgctgagcgggagcaggatggcactgatcagtgtaatgacgataaacggaatttgtgtcaaaaaccactcttttttcagaacaaggctgaagttgacggcaaccgccgcactgatgatatgaatgtaatataagatgtaaaaaggaactttgtctcggatatggccgatgaagtaggcgataaaaaaggcgaaataaatatagctgaacagcatgacagagccggtcgaaatgccgatcagaagaagcgcccataagtaaagcggccagccttttgcaacaaatgcgaagcggtatgcgccaaagaaaacaagtgtgaaaatgatgccggccacgatgacaaaggtagaagagcttttaaaaataaaataaaaaggcaagatgaaaaaaatcatccatatataaggagaaatcccattcagtttttgaaatttaaaatacttcttcatcttcgttccaccttctgctgcttgtgtctaccatcactttatcaaaacaccgccttcattgcatcctcacgcatgaagagaaggctctttctgataagagaaagagccgcgcgtcatatcaggcatttttctttaaaggttctttcggcaccggatggggcgccggttttttccgagcctcccgaaaggtgacaaattgcttttcgtcctcatcccacagacggaatttcatggattcaagacttgttttaagcgtaatggtcggtacgttttttaaaggctcgtgcccctcatgagcggcttccagcttgtagttcggcactttcgggcttaagtggtggacatgatggtagccgatattgcctgtcagccattgcaaaagcttcggaagcttgtaaaaggagcttccttctaccgcggcctgcacatagtcccaatgctcatcggcttcaaaataagaatcctcaaacgtgtgctgaacataaaagagccagacgccgattgaccccgaaataaggaaaatcggaccctgaacaagcaaaaagttttcccagccgaaaagcaggcacgtcgcagcagccaataagacaatcgccgcgttcgtgaaataggtgttccagcgctccttgcggcgggcgccttttacattgaaacggtttttaatcagaaatacgtaaatcgggccgagaataaacataataaacggattgcgataaagtctgtagcgtacttttgtccaggctgaggcttcgttgtattccttgacggtcatcatccaaatatcgccggtgccccgtttatctaagttgctgctcgtcgcatgatggatggagtggctgcgttgccattgaaggaacggaaacagtgtcagcacacctgaaataaacccgaacagccggttcagcttcttttgtttgaaaaaggattgatggcagcagtcgtggaaaataataaagattcttgtcaaaaatcccgctgctataacagtaaaggcgagggtcagaagataggagacattgaggctgaagtaagcaagaaaccaaagggcaaaaaacggcacaaatgtgttgaaaagctgattgacactatgctttgtatcggcaccggaaaatgcagcaacctgcttttttaaagatgcttgtttttgagttgcggcgtgattggtcatgaatgtcatatccccttttttttattatgattccaagtataccgaggcgctcgcggcggttgtagtagcagccatcatgccccgaatatgacatttgtcatgtttggcggcagaatgctgatcaggcggcatatagaaggtttttttataagggataaagccggacacttcatatcggcacttctcaaaaaaaacagcaaaaaagaacccggcctgttttcggctgagttctttttcatcatcctcacagcaaaatcacccgatacttctttacatccaaaaactgcagaaactcccgggccagcatgtccggcgcgtggtcttttccttcatgaagacgatattgaatcagaccggcgagcatggacgcgacataatatgcatagagttttttgcccgcctgaatgtgcaggggctgatgaagataaaacgattgcagcgctctgaacatttccgggatgacgtcaggcactcccgaaccctctctcagaaattgaacgagcggcaggccttccgacagtgccgaaaagagacggacgagcgcggcttccgcttcttccatggagcaatcggcaggctccccttttaccgtcaataatccgatcagatcccggcatgattgatggatgatcgttttcagcaacgcttctttgttggcgtaatggtcataaaaagtggcacggcggaggttgctttgacgggcaatatcggaaatcgtaatcgccgcgtattcttttttttccgccattaagccgaccatggcttcttgcaaggcctgcctcgtccttgtcacccggcggtcggcgggctttttttcttcttgttccggcacccggcggccgaacagccagtaaaaccgtttttgagaaatcaaatcccacacctgcccgctgatcgcttccggtgatgccccgggctcctcattcagccagtacaacacaatggcatacgtgtataaagcgcggtaatgaatgtacatatcctgttcagtcggtgagaaatccgcattgaccggtgacagcagcacatcatgccggaacacatcttttaaaaaagcatgaaagtgaaaatacggcattttatgacggtccatcatcgtttgaaaaaactcccgatgccggtcaacaaaagacagggtcggatgcactttttgccatccgccatgtaaatgaagcacatctttattcttcagtgaatcatacagcgcttcgctcagcccgtctttcatttcttcctctatatcctctaaaatcgcatatttatcttcgtaataaaggtacagtgtcccccggctcacacgcgcccgttcggcgatgtccttcatggtcacacggcggatatcccgctctccaagcatggccaaaagcgcttgtttgatgtcagttgtcacagaatccggcataagagacactcctttcattagacagatcaccgcaatttgtacggtaacgtatagatgtgtttacgctgtctttgccgcaaaaacacaccacattataataggccctgaagaaacaaaaaagcaaccagaggaggaagaccgatggatcagcatataaaagcagacatcaaacgcgtctttgagcttcagaaaaaaaatcaaaaaacgctgcgtgcttcaacagccgggcagcgcagagaaaagcttcagcgctttttagatgccgtcaccgcacatgaagaagaaatcatcgaggcgatcagacgggacgtccgcaagccttatcatgaggtaaaaagagcggaaacgcagggaacgattaaggcgattaaagataatatgaacaatctcgacacctggatggcgccgaaacgcgtcggctcatccgtcagtgccgacgctgacggcgtattaatgtacgagccaaaaggccttaccttaattctcggcccgtggaattatccgtttatgctgacgatggctccgcttgcagctgccattgcggccggcaacagcgcgattgtgaagctgtccgattttacaatggagacgagccatatcgccgcgacagttattcgcgaggcatttcacgaagaagaagtcgccatttttgaaggtgaggtcgatgtcgccacagaactgctcgaccagccgtttgaccacattttcttcaccggaagcacgaatgtcggtaaaatcgtcatgacggcagcagcgaagcacttgtcgtccgtcacgcttgagcttggcggaaaaagcccgacgatcatcgacagcgactatgatttgatggacgcggcgaaaaaaatcgccgtcggcaaatttgtcaatgcggggcaaacatgtatcgcacctgactatctccttatgaagaaagaagtgcagagcacctttacagatctcctgcaaaccattgtcaatgcaggttttatggaggatgatcatacggttgaccgcaacaaattcacgcagattgtcaatgaccgcaactttaaccgtgtcaaagccctatatgatgatgctattgaaaaaggggcaaaaatggccttcggcggcgtattcgatgcgcatgaccgcacgatttctccgaccgtgctgacaaacgtcacgcctgatatgaagatcatgcaggaagaaatcttcgcaccgattctgccgattatgaattacgaagatatcagtgaagccgttgattacatcactgaacgggacaagccgcttgccttgtatgtattcagccataatcaggagctgatcgattatgtgctgcagcatacgacatccggcaatgcttctatcaatgatgtcgtcgttcatttcactgacgtcaaccttccgttcggcggtgtcaatacgagcgggatcggttcatatcacggtgtgtacggctttaaagaattttctcatgaaaaaggcgtatttattcaagcctctaaataaaaaaagaatccgcgcagatgacgcggattcttttttattatttttttgccccgaatgcgagcagtttcgtataagtgccgacatagagcgtgccgtcttcagccagaaccggggaggaaatgacattgctgtctgtttgatagcgccatttttcattaccgtcagcgtcaaccgcatagacatttttatcgtcagaaccgaagtacacattgccgtccgcatcaatcagcggcgccgttctcacaggcccgtcagtatagaaagaccagttcatattgccggttttgctgatggaaaacagctcgccgcttccggaaccgatatacacattgccgttatggtcgatcgctaatgaagagctggagaaaccgtttaacgggaacgtccactttacagcacccgttgatgtataggcgtataagctgccgtcctggtttccggcgtaaacggtgccgtctctatcaataaccggatagcctttaaacccgttggacgtcgtttttgaccatttcacttggcccgttccggaattgatcgcgtaaaagatattattgtacgttgccgtatacagagtgccgtttgatgctaacacgggagcggagccgaccacgccgtttgttttaaacttccacttttgcgtccatgtcgaaggcgacgtcggtttaatcgcatagatatagttatccagcgtcgacacatacagcgtgccgtcagatccgatagccgcatcggaactaggcgctccgctcagcggaactgaagttaaaatggttccggtttctttgtcgatgaaatacagttttttatcgtgagatggaagataaatgacaccgtttgttccgagcaccggagtcagcgtataggtcgtcccgaggttttccgtcacccatttcacagtaccgtccggatgatacgccgtcagcttcccgtcttttgattgaataaatacggtgccgtccccgtcaaccgcggctcccgcaccgttttgaggggtggccgggacattcttttcccattttaacgcgccatcggcagtgcttgtaaaccggctttctcttgaccagttgaacatcgtcggagacatcgcctgcgcgtcataccgtcccgccaagaaaccggatgccgcatgattttgtttaaataccgtttccgcggcttgagcagccgccggatgcagccattttgcccccggcaaatcagaaaccgctcccacagataaagccgcagcaaccgcagcgccggccgccaatgttttcattcgcaatgaagctgtcttttttttcaatgtcagttcctcccgtttctattaaaagctgctatatcacttcgatcataccataattaacctatgaaatatttgtattttcggtagatttatagaacaaatgtcacatagcctgctgatgcttcggggatgatcgaaacgcggcaatataccacaccacattgacgataaaagccgcgcctgaccaaacgaaaaggccgtaataaagagacagctcctgccctaaggaaattgcggtcaataacgtcaccaacaagacagccgcgcaaatgataagcccgattccgcaaaaaacggccatgatgattttcatgacacgaataccgagaatatacataatgagcggaaccgcatatattacaaggatctggccgacggcggcccacatgcccgcggaattaaaacgatttgcgttcggccccgtttctgcaagcggagaaagcgagacgaggaccggcaataaacaaaacagcagagcggaaagcaaggtcaccgcaaccgtaccttttttcttttgattcatgtgaatatcctcctgacaataacccggcttttttaccggtaatctgataatatgttatattttagcacgatttttacttaatttgagaatgttttgtcaaaaacgaatttacaaatccagaaaaatagatataataaacattatggaaccgatattgattcataaagcgctatctaacaaaacacgaagtgatattatgacgtggcttaaacacccggaagaccattttgatgaaagaccttatcttgagcagggactcagtttccgcaccggaatttgcgtcggtgatattcaggcaaagtcggggcttgcgcagtccgtcatctccagctacctgctgaccatgcaaaaagccggcctgctggaatccgaacgaatcggaaagtggacctattacagaaggaatgaaaaacaaattaaagcctttgctgactatgtccagcaccagctataaccatgaaaggagggctttttttgttctgacatatctatttttctgtatatgtagttaaataaaaggaggcatacataacaatgaaaaaaaaaagcagctccatcttcattctatttttggcactaggggttttcgggattatcacgaccgagatgggcattatcggcgttcttccgcaagtggcggacagatttcatatttctgcttcaaaagcggggtggcttgtcagtattttcgcgttcatcgtcgctgtgtcgggaccgtttttgaccttgcttgcttcaggtataaaccggaaagtcattctgcttttggcggtgctgatgtttgccgtttcaaatgcggtctacgcgtatacggcgcatttcagtgtcatgctggcgtttcggatcattccggctttatgccacccggtgttcttttctgtagcgcttgcggccgcggcccggcttgtccccgccggccaatccggaaaagccgtaacgaaagtcttttcaggcatcaccgccggctttgcgttcggcgtgcctttcacgtcttatctggcggatcgtctatcccttgaagccgccttcttattcggcgctatcatcagtctcatcgcattcacgggcattcttctctttttgccatccatgccggtcacagaaaaaatgtctttcagaagtcagctcggcatccttcgcaaaccggctttgtggctcaatatcgctgccgtcacctgtctctttgcggccatgttttctgtctacagttattttgcggagtatctcggacgggtgtcgcatatgaacggcacatgggtcagcttcatgctgatgagcttcggagtgattatgatagccgggaatttcgtcttcggcgctttgttatataaaaatatgaaaaagaccgtcatcctgtttccgcttctttatacagccgcctacttgctcatatacgggtttgggacgtctttcgcgccgatggccgtcctcgtcttcgtatggggcgccgttcattccggcggtctcattgtcagccagacatggcttactgcggaagcaaaggaggcgcccgaattcggcaacagcctgtttgtctctttttccaacctcggcatcaccatcggaacggcggcgggcggctggtttatttcacatttgggaatccatcagctgatgtggtgcggcatcatgtttgcccttctggctttcgggctgatcatgggacgcttggcatggggaaagaggctgctcgcagaagcttaagctccgttgcaaaatccggaatgattacgtataatattccagattaaagcaagggagagaaaaagatacatggaaagaccggcaggattttggattcggtttctggcttacgtcattgatcaaatcatcattggaattccgatttttatcattcaatttatggtctcttttttatttgcggcaggcgttgcggcggctgaccccttcatgaccgaaaatcagtttaacatctcttttctggtgttcggcgtcatcccgattcttgcgagctcttttgtgatcagtatcttatatttcagcctgctcacggcctcaaagatgcaggggacactgggaaaagcattgctcggccttaaggtcgtcaatgaggatggcggacggatatccatcggccaggccttcggacgcgctttcgcatatatcatatctaagctcattctttatatcggattcatcatgggcgccttcggagagaaaaaaacgctgcacgacatcatgtgcagcacccgtgttgtctataaataatgacctcaagtccgggccttttgagcccgggcttttttatgacggctgtgcccgcctgatgtcaatgccgccctttccgtcagcctcaatgcggatcgtcccgttcacaataacagacagcggatggaactccgcatgctgatcagaaaaaatccagcggcggccgctcggccctaaaagcaaaaacgccccatcattgtaatcacccataaaatgaaacccattttccctaagaggcgcatgctttctcaccggaatgccgaaacgctgcagcttcctcccggttgatacgacttcggcagccgtcagattcacctcgccgatattcagaacggactcaatcgaaaaatgttccgcgcttggcggcgatgtttctctcgcgatgaattccgccagattgttggacggatctttgaaataaaaggaacacgcctgaatatgagagaaatacacctcatcctccccatcttccgtttgaaaaacgactttatccttcatccacgccttcgcctcatcaaaacgattattcggaatgttaaacgcgaaatgatacgtcggttgagagtgagaatcggcgcgcctgaattccaactcactttctcccgccttgatggtaaacgaatcaccggactcatcaattaaaggaaaacctaacacccgttcatagaagtgtttcgtctcctccaacgcacaactgtacaaagtaatgttatttatttgcatgatcataccccctttggttataaagacaatgaatatcaatattcttgtctgactccggtcaaaaatgtttcaatattctcaattcggtaagcggtataggggtgagtggaagctaataaagcgataaaaccttttcgaatgtcaatattttcacgttcaatccgatagaaaaattctaacagctcatctccgaaacccgctttcgcagctacttcatctgcccgatattcaaaatctctgcttccgatattcacaaaataaaatcccaaacggcagtatgttatgtaacaccatccgaccagcctaaagaatatatttaataaccccccagacacagaaggatttgatccgccgttcagaagcccttcaatacaccccagaataaaacatataaaaaatcccatcacatacagcggcaacagtgcgatactcaaaatagtaaaactggaattaaacatcacaaggtgtaatgtgtctttaaaagcaagatgcgcatactcatgggccagtaccgcttttagctcaccatcacttaaatttctcatagccgccgaagtcaatcctatcgttttaaaccccagtgcaaatgcattaataccctcatcatctattaaaaaaagatccgcttttttcacatgaggataatgtctttgtacgcttacaaaaacttcatcgtttaacctttcaaggtactccttttctccaatggttgccgggcgccttaacccagcccttattctatttctccagtctccaaaaagtccataattcataaagaacaacaatccgtaaacggataaaaaaagaaaaaccgttggaaaaagcgccaaaggaaataattttctgaagatcataatagaaatcaaaactgtcagcccagaccaaacaatgtataaataattgaactttgtttttctaacttccatttttgatcaccctttttttattatgtttgaatgatttaccactacttaaactgtctttttattatcggtttcgaaaatagcattgtaaagatgatcatccatttttttccgaaaaagaggtgctgtttttaacagcacctctttttaatcactcttcaaaataatccaggtctactctcttgataacaaaagtactctctaaactaacgccgacattatagttgaacattaaatccgttagcctctctccatcaattaatataatttttttatcgatcactttaacatattcttttgcgccatcagtaaatacagatgtagttataaacacaccctttttcgcttttttcccatccaggctgcccgcaaatttttgtatttccggccttgaaacagaatctttccacctcttggcttgaagataaatcatatccagccctaaaatgtcttctttgataactccatctatgccgccatctccagatctccctatagccgtgcctgcatctgttaatgaaccgccatatccaagagcaacaagcaattctacgactagtttttcaaaaaaggcaggagaacatttgtatatttggttcagtaactcttctttaatctcatttttaacagcattataattctgttcaataatttcattgggagttctgggctctgaagtaatcgacggctcactttcctgttgattgctgtctttacccgtctgcttgaatctctgaaaactcttatacttcattagaaatctattatctatactggcgacactcgggtcattaattatttctaagccttcgctggtgatctgaaaaacaccccgtctaacaatgtcgattaaaccggctttacttaaatatgttcttacccaaccgattcgattatgaagtactttttggtttccgctgggtaataatttttctgcatcttcctctgacaggtttaactcttctgctaatttcacgtataagtcttgtaatctgtgctcctttttatctgaaagaatttttaaaaaagggtacataaattcttgatatcctggtatggtcaacttctacactcctatttaacgtctttgttaaaactggcttgatatttatattatttttgcgttcctaacacccctgcgtaaaaccatcttcatttcacacttaaatctcatgatgatatatgaggtaaagctaatataagaacttccgctatccataattgaataagttcaaaacaaatatatatctttaaattctgaacaccggactgatcatttttttaaaaaacctaacacccgttcataaaagtgttcctgaacaaagttactttatttgcatgaccgtcccctctttggtttatactaccatatagagggtggattcttgatattattctgcaccaattgagaatccccctttcgcccggcgttaaacatgacaaacagcgccaaaccgcttataccaggcgtttttaaacatctaaagcaaaaaaagcagaaaataataccccatatagcttgacaaaaaataaatgttatttaataatctatatataattagaattattattgaaagataaagtgaatgctttgtctttttaatatatttcaaatcacatttcaggaggaagatattatgtctttaatcggaaaagaagtactgccattcgaagcaaaagctttcaaaaacggtgaattcatcgatgtaacaaacgaagatttgaaaggtcaatggagcgttttctgcttctatccagcggatttctctttcgtttgcccgactgaacttgaagatcttcaaggacaatacgctgcactgaaagaattaggtgttgaagtatactctgtttctacagatactcacttcgtacacaaaggctggcatgacagctctgaaaaaatcggcaaaatcacttacgcaatgatcggtgacccatctcaaacgatctcccgcaacttcgacgttcttgacgaagaaactggtcttgctgaccgcggaacattcatcatcgatcctgatggcgttatccaaacagttgaaatcaatgcaggcggtatcggccgtgacgcaagcaaccttgtaaacaaagtaaaagcagctcaatacgttcgtcaaaacccaggtgaagtctgcccggctaaatgggaagaaggcggcgaaacacttacacctagccttgatttggtaggtaaaatctaaggagtgcattccattggtacttgatgcaaatatcaaagcacaattaaatcaatacatgcagctaattgagaacgacattgttctcaaagtaagcgccggtgacgatgacacttctaaggacatgctggctctcgttgacgagctggcttccatgtcatctaaaatttcagttgaaaaaactgaattaaacagaacaccgagcttcagcgttaatcgtaccggagaagacacaggcgttacattcgccggtgttcctctcggccacgaatttacatcattagtgctggcattgcttcaagtcagcggcagagcgcctaaggctgatcaaaaggtcattgaccagattaagaacatcagcggagaataccgcttcgagtcttatatcagcctgacgtgccacaactgccctgatgtcgtccaagcattaaacatgatgagcgtgctcaacccgaatatcactcatacaatgattgacggcgcggcattcaaagaagaagtggaaagcaaaaacatcatggctgttccgactgtattcttaaacggtgaatctttcggaagcggccgtatgaccatcgaagagattctcgcaaaaatgggcagcggcgcagatgcgtctgagtttgccgacaaagagccgtttgacgttcttgttgtcggcggcggacctgccggcgcaagcgcggcgatctacacggctcgtaaaggcatccgcaccggtgtcgtcgctgaacgcttcggcggccaggtactcgacaccatgagcatcgaaaacttcatcagcgtcaaagcgactgaaggaccgaagctcgctgcaagccttgaagagcacgtgaaagattatgatattgacgtcatgaaccttcagcgcgcgaaacgccttgagaaaaaagacctcttcgaacttgaactcgaaaacggcgctgtactgaaaagtaaaacagtgatcctttcaacaggtgcccgctggcgcaatgtcaacgtacctggtgagcaagagttcaaaaacaaaggtgttgcatactgcccgcactgtgacggaccattgtttgaaggcaaagacgtagccgttatcggcggcggaaactccggaatcgaagcggcgattgaccttgcaggtatcgtcaatcacgtgactgtgctggaattcgcgcctgaactgaaagcagacgaagtcctgcaaaaacgtctttacagcctgccaaacgtcactgtgcacaaaaatgcacaaacgaaagaaatcacaggcgaccaaaacgtaaacggcattacgttcgttgaccgtgaaacaggcgaagaaaaacacgttgaactccaaggtgtattcgtccaaatcggcctcgtgcctaatacagaatggttagacgaaacggtcgaacgcaaccgcatcggcgaaatcatcgtcgataagagcggcgcgacaagcgttcccggcctatttgccgcaggggactgcacagacggcccgtacaaccaaatcattatctccatgggatcaggtgcaactgccgctttaggcgcatttgattatttgatccggaattaatgtgaaagccgccatatgaatggcggcttttttaaatatactaattaagaaggcagtatttcctctaaacaatcctcgctgattttataagattttggccttctgcttaccagctcaacaaatccttgctgttctaaataatccattactctgttaattttatgtctcgatttatttgagagctccattaaatcttgcaccgacagcgtaacctgatcatttacaaatacattaatcgtgataatgatattaaaaatatcacgttcatctttataatcagcccattgatcgctatcaatatagttcctaattcgtttcagtttcattaaattaaattcaagatcctcaataattcctttttgtcctgacagaagcaattccagcatatccattaaataaaaagtcagctctccccggtttaaaggtgcgggaatttcctctaatgccttataatacttatctttgttcttattaactgcgtaagaaaaagtgatggctgaatatttttctaagtatcgggacaaataactcccaacgataaagcgtcctgttcttccattgccgtcataaaaaggatgaatgtattcatagtagtaatgagctgtcatgtaacgatacagctggggatgtgtttcatcatgaagataagcaattaaagcctcaagcgcttctgttatcttctgttcagaattaacgccgatatgggtggtcatgttcccatcgttcacttcaacatagccttttctgaatagctcaccatccggcgcatcttctgctccgatttcatctgcgaccagctcgtcatataattccctaaagtcatgaatgcttgtaaacgacggaattcggtctataaattgatatgttttcatcaatccgacaaaccgcttatgtgagggctcggattgttctaacgctttaagagcctctttcaattctttttttgtactgcggattccttcaatttcattattactctgtgcttcattaataattaatttatcaaaataaggtttgacggcaaattcggggagctgactgataagggatgaaattttggaactgtttaacaacacttcattattcagcttcatgagtttatgtgtattcacataaaatagctcaaatgaatcgtccgtgggtcggccttttcggaacccccgtatgtttaatgatgttgaataactgccatagctgcttgttctctttttaaattctttctcatatgaatcagcatccgttttataaaaaagcttagataacttctcatacttcatattatcacctcgcttaatttaaaattatacacttttttaaattatacaatcattatagcctgattcctaacaaatattctcgctttccaatcaaaacaaaaaacggcatactgcatggcagtacaccgtctgaagcaattcaatctgtctttctccctctcgcccgatagataagaaataatccaataaaccacagcggcgtcagcagcaaagccgggcgcgttgcatccgcaaacagcataatcaccagaatgacggcaaacaacgccagcacggcgtaattgataaacggcgcaaacggcgccttgaaagacgagcttgcatgtaagtccggacgggttttcctgtatctgatatgacagaccagaatcacgccccacacccaaatgaaacaaatcgcgctgatggtagtcacgatgccaaaagccgcttccggtattaatttgcttaaaagagcgccagctgacagcacaataaccgatatccataatgcgcggctcggcacatgatttttattcagcttcgcaaaacttgcaggcgcttgtttcgttttgcttaagttatacaaaatccggcttgttgaaaacatcccgctgttacaagcagaagcggcagacgttaatacgacaaaattaatgattcccgcggctaacgggatgccgaccaggctgaaggtctttacaaaaggactttccgccgcattcagctgcatccacggattaatacataaaagaatgagcaatgccccgacgtagaaaaataaaatccgcaatggaattttattgatagcggacggaatattttttttcggatttgacgtttccgccgccgacacacccactaattccacaccgacataggcgaagatcaccatctggaacgaaagcaaaaagcctgaaaatccgttcggaaacaagccgccgtgctcccacagattcgccgctgaaaccgttccggtatgcgttttgaacccaatcaccagcagaaccacaccgatgacaattaacgcgagaatcgtgactaccttaattaaggcgaaccaaaactccaattctccaaaaatcttaaccgttaacagattaagccctaataaaatgagcaaacagataagcgccggaatccactgcggaatatcaaaccaatatttcacatacacaccgacggcgatcacatcagccatagccgtcataatccagcaaaaccagtaggtccagccggtgacaaacgctgcacgcggtcctaaatacgcctcggcaatatccgttaatgattggtagcccgctttagataacagcagttctcccagcgcccgcatgacgaaaaaaagcgcaatacctacaataaaatacgcaaagatgatagaaggacccgccagctgaattgccttaccggaccctaaaaacaatccggtgccgatcgtgccgccaatggcgatcagctgcacgtgccgattcgataagtccctctttagctctcgctgctccacatctgactcctccttacctctctagtgaacgacgagcaaaaaaagccaataaaaaaagagattggatgccctccaatctcatggtcataagaatatcaaattatatctgcgccgctgacaatcaacagcatgacaaatacatattcggtactcttctgtccttttgcctgagattgtgaacccttcggcgccgcggaaaacccgcggtctctccagaagccgctcctgctgtagttcgacccacagcaatcatagcctgctacgtattgagtttctgatagaaatacctatcagctaactttttattttaatggaacttgaatgcattgtcaatagagggatgagctgcacggcgttatccgggtccaatttttgatgcctgaagcgcgtattttccgttttcattgtctcaaaaaggcgttatgcggtactatcatataaggtctaatcatttaaacattatgtcatactttaaattcactttatcatacaattgctcgtaaataaaaaggggatggacgagattggaaacgaaatatttagatctgctcgcacaaaaatacgattgtgaagaaaaagtggtcacggaaatcattaatctgaaagcgatactgaacctgccgaaaggaaccgagcatttcgtcagtgatctgcatggggagtatcaggcattccagcacgtgctgcggaacggttcaggaagggtaaaagagaagattcgcgatattttcagcggcgtcatttacgatagagaaattgatgaactggcggctttggtctattatccggaagacaaactgaagctgatcaaacatgactttgatacgaaggaagcattaaacgagtggtataaagaaacgattcatcggatgattaagctcgtttcttattgttcttccaagtacacccgctccaaattgcgcaaagcactgcccgcccaatttgcttatatttctgaagagctgctgtacaaaacagaacaagccgccaacaaagaacaatactactccgaaatcatagaacagatcattgcgctcggccaggccgataagctgatcaccggccttgcctacagcacgcagcgattggtggtcgaccatctgcatgttgtcggcgatatttatgaccgcggaccgcagccggataagatcatggaagaactgatcaactatcattcagtggatattcaatgggggaatcatgatgttctctggataggcgcttattccggctcaaaagtatgcctggcaaacattatccgcatctgtgcccgctatgacaatctggatattattgaagacgtttacggcatcaatctgagaccgctattgaaccttgccgaaaaatattacgatgataacccgtctttccgcccgaaagcggacgaaaacagaccggaagatgagattaaacaaatcacaaaaattcatcaggcgattgcgatgatccaattcaagcttgagagcccgattattaagagacggccgaactttaatatggaggaacggctgttactggaaaagatcgattatgaccgcaatgaaatcacgctgaacggaaaaacatatcaactggaaaacacctgctttgcgacggtgaatcccaaacagcctgacgagctgttagaagaagaagcagaagtcatggacaagctgctgttctctgttcagaactccgaaaagctgggccgccatatgaattttatgatgaaaaaaggcagcctttatttaaaatataacggcaacctgctgattcacggctgtattcccgtcgatgaaaacggcagcatggaaacgatgatgatagaggataaagcttatgcgggccgtgagctgctcgatgtatttgaacggttcttacgtgaagcgtttgcccatccggaagaaaccgatgatctggcgacagatatgacttggtacttatggacaggcgaatactcttccctctttggaaaacgcgccatgacaacctttgagcgatacttcattaaagagaaggaaacgcataaagaaaagaaaaacccgtattactatttgcgcgaagacgaagcagcctgccgaaacatcctgaaggaattcggcctcaacccggatcacggccatatcatcaacggccatacaccggtaaaagaaatcgaaggcgaagatccgatcaaggcaaacggaaaaatgatcgtcatcgacggcggcttctccaaagcctaccaatccacaacaggcatcgccggctacacgctcttatacaactcctacggcatgcagctcgtcgcccataaacactttaactctaaggctgaagtgctgagcaccggaaccgacgtcttaacagtgaaacgattagtcgacaaagagctggagcggaagaaagtaaaagaaacaaacgtcggtgaagaactgatgaaagaagtggcgattttggagaaactgcgggagtatcggtatatgaagtgaagaatatggagttcagggatgattctctgggctctttttttacggtttccctgtatgtaaaacggatttaaccgcttcttcaatctccctataacccgtacatctgcaaatattggactccagccaattttttatcgtgtcatcacttgcattcggctcagtattcactaaagcatgacaattcatgagaaaacccggtgtgcaataaccgcattgaaacgcgaatttttcaataaaggccttttgaatcggcgtattgatcagtccttcaattgtcgtaatgtcctttccttccccttctgccgcaagcattaagcaagatttcatcggcaccccgtccgttaataccgtacaggcgccgcaatccccatttaagcagcccggttttgcaccagttaatccgagacgaagacgaagagcaaataacaaagtatcagccggcctgaccgtaatctgtctttcctcgccatttactttcaacgtaataggatcagacatttggacctccttctaattcccgtagggcatctaaaattgtattttgcaagacaaatattcggtattcacttgagccttctgcatcatcaagaacgggtttgggtacatactgtaaagacctgcttactctttcttctgctgatcggcttttatcgttaagcacagcctccatttcagcagaacgaaacggaaatggacatacgccgctgaaggccattctgatctcatcatcttttttcagcgcacagaccgtcaccaatggatacccgacattccactgctgtcttcttttgatactgacaaatggcaggtcaacgtacgctcgatcgacaacgacatgaaataaaaaatcacctttttgcaactgtatttccttgttaaatactttatttatggggcggtaatgaatccccgctctccctgcaatccctatcaaactatcggaaattaacaacggcagcacggcctcacggtaatagacgcccccgcaaatgtttccgcccaggctgatcttatttcgagtcgtccgatcggctatttcactgactgttttacttaatagcggaaatggattttcttcctccagtttcgttaatgacacgcccgctccgatcaccagatcattttcataaaagcggatggtttgaaattccggaagcgcgttcatatctatcaccgcatccgtatagatgatattcagccttcctaacgtgataatttccgtgccgccggaataatacattggtgttttcttttcggccgcaagcgagtgaaatagattgattgtttcttgaatggtcttcggtttaaaatagtcgaaatcaaacggtatcatctttccacccctcttgcgtcctccataatcgttcgggaatgagaggaagttgattcaattggacacctaaagcggcggaaaggcaatttcccaatgctgccggcatccccaacagtccgtgttccccgccgccgcgcgctccataaggggcaatcacatgcggggtttcaacaaattcaatgatatattcaggctgctctccatagtgaagggggcggtatgttctaagctgaggatttaatactctgccatatgaatcaaatacaaaggtttctcttcctccaaatgcgattcccatactcatcccccccattacttgacccctagcagctttttcattcagtacagttcctatatccacaacagaataggcttttgtaattcgatacgtataatcccgtttatccaactcaacttcaattccctgagcaccgacagcccactcgggtcccggcttcccccttcccgtttcccggtctaaattcgtcatccgggttaatgtgtaattgccgctcgcaatgatttggccgccaatggtatttccatttggaaacgtatatccgtaagcaatgtcttttatttcaacatgtacagaaggatgatctataaaataaacctttccgtcggccacttccaattcctcgacaggaacccgcaacacacatgatgccacgtctttcagctttcgaatggcttcctccgctgcattcagtacggcatttccggccattaacgtccctctgctccccacggttttccaatgctcgggtgttgtttgtgtatctataagcatttttacgtgaattttgcttatatccattttcattcgttccgccaggatttgggctagcactgtttttgtccctgttccaatttccactacccctgacatcaaattaatgcttccatcgggattaaaggttagaatcaccccggacgttgcatttgtatcaaatgttgaggttttccaaatgcagctgattcccttcgcccgtatcttccggccatcgatttcaattcgctgtccctcggaccaattcattaattccttcaatctctcaatgcatttcggcacatttccgaccgtgcttgaattgagaagaacttgagtcggtgtggtgtcaccggggcgaatggcatttttatagcggagttctaatgggtccatgttcagcttttccgccaatacatccatcgtccgctcaaaggcaaataacacttcagcatggctgtagcccctgaatgcacttggatatggatgattcgtatacatacaatatgaatcacaccgtatatgatcgatcgcgtacggacccgtacaatcaaccaccgcagcccggctgatgtccactcctttatcagaatacgctccgccatcaaataaaaactgaatgtccgccgcctttaagattccatcctttgcagcccctaatttgacaatggcatccaacccgatatgaacgggagatgtgatcagatcctcttctctcgtattaaacaatttgacgggccggcctccgactgcttttgatgccaaataggcaatcacctctaactgaacggccgcttttcccccgtacgctcctcctactaaaggcgttttgacgatcacctttccgggttcgattccaaaataccactgcattaattttttaatggcaaaaggagcttgagaggatgtggtaatgataatttcctcatccgcccgaatttcaacaatcgagcatcttgtttccatcgcagcgtgatcagaagggttaaaggaaatctggaattctgctgtcacatcactttccctaaacccgtcttcaatatttccttttctaaccttatccacgtttgcgatattggtcttcggaaccgggaatacaccttttgtcttctcatagcggtccgcatgttcatggacgagcggcgcatccttttgaaaggcctcacggggggaattgacgacgggaagaggtttataggatactttgatggcatccgctgcctttttagctgtaatcggattttccgcaacaacaacagcaaccggctcaccatggtatctgacccttttataagcaatcggcgatctgtctttaatttcttcacctgcaagcggaaaaggttcatcacccaatatcgctctcacgccgggaatcttccaagattctgaaaagtccatagacacaatatcggcatgagcatatggactggtcagtatttttgcgtgcaacgtccctgtttcttgaaaatcatccgtatatttcgctttacccgtcactttttcaagggcctcttttcgaatgacactcttcccgatatactccaactcattcactccccgaatttattcagcagcagcgtataatcttcaactgtatcgacgtcataaaaaagcaaagggtcttgaaagctgatcatttttcccgtattgatcatactttcacggatgacatgccgggcgccctgatctccctttaactgatgcaataccggaaaacattgatttgagaataaaatggggggcataggaagatgatgattttcagcggcgataaatgaataacagggctccttttgataggaatcaattaacgtattgatgatatctgcggtgacaaacggctgatctgcaaggagaatgataacggcgtcagcctcatactctgccgctttttgtaaaccgcattgtatagaatggccttggcccttatccgcttgctcacattctgcctgactccacttatttgataaaggatttaaaaagaaaacatccgaaagccaatgcagtggatctccctttcccgttataacgaaaatatgatctaattcagataacaaggcatttttaagagccatacttccaagggaaactccattcagaactaaacttcgcttatccgtccccatgcgtctgcttgtaccggctgccaggtaaatggctgctgttttcataagagagaccttagctttcgcatttctttaatcatctcgccgacaatgcttacagcaatctcttcagggccttgtgccccgatgggaagtccgataggggaatgaatatcctccggaatctcagctccgcctaatagccgttcagtgcgccttctggggcctaatacacctttataaaacacattctcgttttttaatgtatgtaaaatgatctgatctttttgaaagctgtgtgtcataatgacaacaaaatccctttttgtcatgctcagaccttccatgacttcttccggtgctcctgttatcaaatgtccggcttcaggaaaatggccgtgatgacataaagcgggacgccagtcaatcaccgtcacatgaaagccagtgccagctgccaacgaaactaacggcttcgcatcttcccctgctccgaagacatataaacaaggttttggcaccatctgatggataaaaaataaatcagaggtatgttcatccctcttgattcccttttccgtctgtctcagtttttgaatacggccttgttccataacatccccggttccaaacacttcgccgtcttccactatatacagatcttccttaggctctaacgttttagtgaatcgtttcattcgggtcacagactttttttcatctaagcatgtcttgactgtcatcagatttcgttccaattccccttttacaggctcaagtaaaaccgtcaaaacaccattacagccaatgccctgtccccaggataaatcgtcttccgagctcatatcaaagcggacaatcaacggctctcctgcagcccagacctgttccgaccgttcaacgagatcttcttccagacaaccggcggataacattccgactcttgttttatcccctaaaatcagcatcgaagccccttctttcttataagcggacccctctgttttaataatggtagccagtaccttagcttttttagaagtggcgatgacatccaaaatccggtgtatatcatccatttcatgtcccccgttttacctgatcatatctgcatctgtaaatccatattctttttttccagaaaacattacaaacgcttcagcaattttttcgtttctaaaaaaaaagagtctttatagaccttatgaccgggcggcgggtgcgacagcatgtcggagcggagagattccaataacatgtcctgttccttctgtttccaattgtctgtttcaccctgctgtattcctataaaacccgcaaagtattcacttaacacttgtaaatcattccccagctcccttttgtcacttgaagataaagctccttctttttcccaatcttttaacgttttcactatatttgatagatactcaaatccggcgttcaacttttgcatctctatttgatagcttgaaatgatgattttatgtttttttctgacggggttgaattttaagctgtcagaggctgtttgcagcatctcttttgccgtatgcagctcctgcagaagatggttcattctatacgccatgaggtttccttttccttgtccccactctgattgcacccatttggaaaggtctgaaagtgtgccggaaagctgacgagccaatgtttgaaaagagtccgctgccttttttgtgtagtccggcggaaaaaggaacatgtgaaccagaatggcgataatgacgccgatcaccgtatcgatgattcggtcgaatgcataatctttagcgtttcgttcaaacgtaaagaccaacaaaatggtgagcgctacctgatgtagaaccgttacatctattcgtaaccacttcgcaatgtaagtaccgcctaataggaacagccccagcatccagccattcattggcaagtgactgacaagataggacgttagcatgatcccaatcgcagttcccgcaatacgatgaaaagaaaagcgaattgactgatctatcgttggctgcaaacataagataacagaaagaggcgctaaataggggtgatcagagccaaccagttttgccgcttcccacgaaacagcagatgcaatcgccatcttccaaaccaaagatgttttgttttgaattttttcacttttcatcatacgccccctcctttcagaaaccttttccactaggtttccgtgacgcaaagggatttatactgacaacggaaaaatgattgtcatggtcagcggcggcttctccaaggccaaagtgctaagcaccggaattgatgtattaacagtgaaacggttagtcgacaaagagctgaaacggaagatagtaaaagaaacgaatgtcggtgcagaattgcataggaagtggctattcgggagagattgcgggaggatcgttatatgcagtgaggtaaatatggggttcaggaattgtgcattttctcaggctttttttacagtttttcagtatacgcaagtaatactagtgcatataagaagacgctattatgcacgaacgcaaacttcaaatagaaatatccgagtataattaggatctggtgcaaacaatgcgttttgaatggcagagcacattttatttaactcaatttctcttaatagataatgataattcaataaatatcaaataatagtgttttatctctagtgataaatttcgattaactaagcaaaaggagttcaagagtagctaataaaggaaagtcacctttacatctacagaatttgactttttaaatttttgaattatttattttcaagctatgtagtgaaacgggataaagctaggtctaaactacaaaagagatttatagctcaaaaagattggttgaggagtgttaatacttcaagtatatatgtaacattgattataaaacacaatctaaataatagcatttgcaagtatagttaataactagcgatataatgctccaacttaaattagataacataaataaacttaaaaacctttttattttatgagaaactcgacaccctactatagataattgttttcatcaacactcaataactatgtggttatttgtgatacgggaaaccgtgatgtactggtatcggatttgagaactacttttattctttaaaatatatacttcgcgaataatataccttataatgtaaactaaggagatgaagacatggcccagttagcggattttattaatgactcgacatttatatcatcaatcaaaactgctttcactaacctaaaagatgatattaattttgaggatcataatagtaaaaaaataatatcagatttacaagatctacatgtagacaataatcaattcttgaataccttaatagagaaatcgaaaaattccagtggtattattaatggagaaagaggcacgggtaagactcaccttttattattatccaatgacaaactaaatagtagtataaacaatcataaaactctatcgatatatataaatcttaaaaatatttcttttcctcagagtgttaattcagaaattttcaatcgtatttttagtattcacttatatgaacaaatacaatttcagataatccgtttactaaaaaatttagaagccgataatttatttgaaactttaaagctactctttaataaagatgaacgtgaaactattaaatcttttacagaagctttgactatgttaattaattttaaaaatattagtcggcttggtaacgtaaaagtttctgaagtaagtaccggtagtttaacacttgaaagttttcaaaaagaaattgatgaaatttgttgtaaagttaatgctggtattacagaaaaaagtttttctttatcgagtgagctaatgaataaacaaatagaagagtcctctgaaaaattactgaagaataatgactacttatcttacttaaatctacatagtgtaaaagaaaatttagttgcactagtaaacaaattatctttaaattcaatagtcttttatatagatgagtgggaaaaaatatacaaaaatgacaatatccaagaatatacagccgactttatagataaaataaatggctctcctatctatttttggattgcatttgtaccgggcagaggaaatttacatcaacttgttcaaggagctgacctacaacatccattaaatttggatacatctttaatatatgaagactctaatcatgaaagaagtagatgtatcaattattttaaagaactagtaaataagcgtttacataaatatttagattcctaccaagttgattacggtactttatttcgcagcgaagagatttttagagagttggttattgcttccatgggtaatagtagagactttggattgatgcttagcgagtgtattgaccagtacctagcataccgaacagatgccttaacccctggaagaccttttcaatatataagtaaagacatgattgactctgcaataaggtctcatggtcaaactaaacggcgtaatattatgtctacaaacaatgaaaatattatcttaaaagacattgaggacttctgtagacaaaaaaaatctagtcattttgcaatagagattaccaaggagaatatcgaactcttaaataaacctcagttttctgaactcttttatcaaagattaattcatttgagaaaaagagacgtttctaaaaaagtaggagacgatgaaatacgcctagatatttttgcaatagattactctagcacttattccctccataataatgaaaagcaatttaatttttggcttgaatattcaccaatccatgataaagttcgccgttatatatattctcccaaaaaaatttatgaacagatcagcatttccgagggtgaaagtatgaattgtaaaaattgtagacgagttgttaatattaatacttaccaaaaactttgggaaaaaaatatatgtcctcattgcgctgaaaatctttactgatcttagatgtttaactgaaaaaataaggagtagtttcactctttaaagataatgtcctattcacaatgcatagggcatttttcattttccttataacaaagaaaatataaaaataatgaaaatctaaagcataacagcatcccacttcgagatgctgtgaaccactcacttatgataaggctccccacgattaatccgaaaagcccggtaaatctgctccactaaaatcagacgcatgagctgatgaggaaatgtcatttttgagaatgacagtttgtcgtctgcgcgcttcatgacggcgtcgcttaggccgagtgagccgccgatgacgaaggtgattttgctttttccataagtcgccagcttatctattgtatcggccagttcttcggatgttttcatttttccttcgatggcgagggcgatgacgtgggtgtccgggctgattttggccaggatgcgttcgccttctttgtctttgacgattttcatgtcttggtcgctcaggttttccggagctttttcgtccgggagttcgatgatgtcgatttttgcgtaggctgagagtcgttttttgtattcttcaatgccttgcttgaggtatttttcttttagttttccaatggtcacaatattgatattcacaggtcatccccactttagaaacaagttattcatatatattgtccacaattgtggatatcttttctgtattttgtgtaggatcattcgttccctactagatatgttgcagtgtccccacataattcacaggctgtggataaactgttagtatgttcgatttttctgatttcgggcggaagctcatgatcatctatgtacatgtccagcacggtttcgatatgttcttcacaagaataataagcggttttcatagttacgtcctccggttttcttttgcgcgcggcaattgttctcctttcaatataacctatttatacacatgttagtagtgcttcgggctgagttttatccacaattcggcaaatcacgcgcaaaaagagccggtgttttcagcatccggctctttacgtgttttctcttttttctaagcgaaggacgaacagaattcctaatagacacgccagcagtgtagagcaaacatcaatccagtccggctttccgccgtttaaaaaagagttggttattacggaaaccaggagaatggttacggtcaccgcggcaagctttttcttcatcggctccctcctaaattcctctatctctatgttcggtcggcttttttcttgttatatagccttatcaagagggtcacaacgatatatacaaccataatcactgccccgttactcacatcagggtatccaatcaacatattcattatgacaaaaacaatggttatgcaaatgacggacaacaataagaagatactgaatgatttcaaatgaccaccttctttcttgcagtaacgtttcattataaaaagcttaccaaaagcggcaagctcttttcaaatctgcatatttcaaccaaagaattgttcacaaatttctttagcacctgcttcgccaactccattttcaattgctaaacataaaggcgagcacactactgcgccgacagcacctccgacagccatacaagcacctgcgcaagcaatactggatcccagccccagcatttttgtgactaaatcgttacaggactccaattttgattttgccggagatgcttttttgacagagttcaataaagcattattccccttgccttttaatccatcttgattaaaatcttcattaataatttctttatcgccaactcttaatttgaagtttccttcttttttttctttgtcccattttcctataccctctacggataaaacgatttgctcagtgtttaaattaatatacctctgcgcaaatgaatgattttgttgatcttcataatgaaccaatgcaatcttatgatctttattatttaaaacagtcacaaagacttctgttttatccatatccaaatcatctctgtctttgacgatattcaaagctttttgtctgtcttttttacttccttcagacttaatcgttttatcacagacagggcatgtgatttcatcttttattgtctttgtactaatagcttctgtcacacctgaaaaactgaacataaaaacaaaaataactactcccacaaaccatttgaaacgttttttcactatatatcctccttttattcagtctactactctatatcctcaaacgagtacaggtaaaccaataaaaggtttttttgtttatataatccaaagtttgtgttttcattatgatgactgcttttccttctcaaacccatccgtcacctgcacatcatacagcttgagatggcttttcggcgtcacgatatctttcagacccgggatggtcaggccgttcagttttttgcccgttttcagatcgaaggattcgattttggcaggctttttgtagctgtacgtaaacagatacagctttccgttttgatgggtcagctccttgaagtcggctttcattcgtgatgcggggagcttgaaggcttttttgctttttccggtctcagagttgatacggtacacgtttccgaagccgtcaacgaaatagaagctgcgccgctccatgaaaaagctttttttgaagctgaacggcatggagtcatagatcgtctgttcgtcatttttataagcggcgatgtcatacgttttgatggcgccgctgtttttcatgactttcaccatttgatagatgtgttctgctttttcccctctggtgacaaagcagacggcgctgtcatccgcgacgagctgggattcgacagacgtgccttctttatacgtccacgtcgcgattgattttgtatggagcttctctttatcagcctgaatgtcttggacgtgatagcctttttcgtcatctgtcggcgtgagtgcgaaaagatgatctttaaaaaagcctgaagcgcggatatagtgcggaatgacgtcttgcttccacttgccgtccatctggcggtacagctctgagcgatagctgccgccgctcttgtcgtagcccgaattatacagcgtgtaaaagcctttcgcctgctcgatatatcccgcgctgtctcccgtatgctggtacgctcttttatacgtgtgaaggccgtcctgaacggtatagattccttttttgtcctccagcagcacgctgccgtcatgcactttggccgatccgagctcaagccccttcatgtgataagaagagagccgtcctttttcatcggcgaagagggcgtagctttttccgccgccgaacgtgtcttggtcagccgcagtggagaagtacagcagcgcctctttatctttcagaaaatcagggtcatttaatgtgtctctcgcaacctccgcaggatcttccgtgcggaaatagaagaagcataaggccgctgcggcggcgatgatcactaagggtatccaaatgatttttttcacgttgttctccttagtgaatggtcagaatcgtggttgtgtaggacgagcttgtgatgtcgcgcgggtatacgcctaagccgccattagagtcgatatcaatcccggcttttaagaggaatgccgaccacagcagttttgagcagtttttggcgccttcatggcccgtatttctgttattgacgaagttgaaggagtactcatcaccgactcttgatacagcccagtcagcggcggcttgtttttgggcgtcggtgactttcacggtctggacgattgaattgtcttcgacttctctgccgttataagcaatctggcggacgccgtctcccggcacggattcaacaattttatcagcggatgaatacatgccgacatgcccgtggttgtaataagcggtgtatgagttcgtgtaataaatattgccttttgtgcttttcggaagttttttggttcctgacgatccgcccatcgcagagagcccttctttggaagcgattacatttccctgcaccttgtctgccgtgatttcttgatgaaactgcttgagaattgcttctgttgaaacgtgcttctgtttggcaagctctttggcggattggagaacgtcttgaggagtcgtgccctgctgaagctctgcgatttcttttgcgtagcgggctgtttctgtttctttcgcttttacattcataccggagaatgacagaaccatggtgaatgacagggcaaacgggaggacggctttgaacagctttttacacatattacttcgcctcttttcttttagtataatttttccacatttgtattatatgacagaattgcgataaaaaaatagataatttacagatttttaaaaattttataacaatatgtaaatcatatgcataaatcattttcaaatatcaggaaatccggttatcatacaagaaagggggaggacatatgaaggacagaacgatcggttcgatgcgggtttccgcaatggggttaggatgcatgggcatgtcggaatactatggcagccagagtgaggaaaagtcgatttccaccctgcatcatgccgttcatctcggcgtgaatttgtttgatacggctgatcaatatggattgggtgcaaatgaagagcttgtcggcagagcactcgccccattcagaaaggagctttacctcgcgacgaaattcggttatgtccgaagcgaaaagggtgagtttatcgaaattaacggacggcccgattatgtgaaaaaagcgtgtgacgccagtctgaaacgccttgggacggattatatcgacctttattatctgcaccgggttgatccgcgggtgccgattgaagaaaccgtcggcgccatgaaggagctgatagacgaaggaaaggtgagatatatcggattgtcagaggcttccgcagaaacgatcaggcgcgccgtccgcattcacccgattgccgcgcttcaatcggaatattctttatggagcagggaagcagaggagcatgtgctgcccgcctgccgtgagctcggcatttcatttgtgccttacagtccgctcggcagaggttttctttccggaaagatgacgtcgaccgagcagctggatgccgatgattacagaagaagaacgccgagattccagggagacaatttggcggtgaatatagggctcgtccaaaaacttaccgccattgcccgggaaatgaatatcaccgcgcctcagcttgcgctcgcatgggttctcgcaaacggcgatgatctcattccgatcccgggtacaaaaaagaaacactacttggaagagaacctcgccgctctcgacattgtgcttcctgaggatgtgaaggcgcggttggatgagatgtttccgatcggcacggcggccggcgagcgttatccggaacacatgatgacattgttagatgaataacaaaagaggcccatcgtgcgggcctcttttcatgacagctttttgctcatgatgacatccgtctccagaaatccggtcttctcatacagcttccgcgccgtttcgttatgagcgaacacatggagagaaaccttgcggacacccaggtctttggctttgtcctccagccttgcgagcgcctcttttgcatagcctttgccgcggaaaggcggatgaaggccgaaatcataaataaatgcgtcctgctgcgggtggtccggatcggcgtgcagccacagccagccggcattttcctttccgtccaatgtcagcgtccataaatagtgatcggccgtctccaagccgtcaggaagcaggtcattaaacgccagctccgctaattccggcgcttcgtcaggcagccacgttcccgcttttaccttttcttcaccgtaatgcttggttgaatgagcgagataggactgaaattcttgttctgtcatcggctgcagcgtgatagccattgaatcactccttacaaaacacagactgaaagcggtatcatgaagtattatccgaaggctccgttttccgccggttttatgatttgttcggcttgtgccgttgaaccagtttgcgcaaataatccaatcgaaatgagacttgccaaggctgctgagagtacaatgaatttacatgttttcattacgaatcccctccgttaatctcaaaatttggtcattggcatcaattgattcttgaaaatacttcgccgccagtttgtaattctcctgttttttaaaatgcgcagcggcctgatacgataagtcggaaacgtcactccacagctctttccttcttaactcggcgaaagctgattcaagcgcttcttcattgttgtcaataaagacatgctgtaagatgcgcagcttttgggtgtatacgggttcgtttttttcttcagcggcattcagcgctttatgcagccaaaaccggccctcatccgtcttttcctgcttcaacaatactctggccagcatgtacagactccgcaccgaatacgctgatcgcaaatgctccttttgatcgagagccgtttcaaactcgacccgcgcctcctcaagcttttcctgtctttcatagcaaatacccgcgttaaagtgggcgagcgcttcaatgtgcggatcgcccgctttggcggcttgatgaaccgccgtctgcaggagctcttcggctttctgatagtgaaacaagtccattctgttacagccgatcaccattaaacactgtgcttctctgaccgcgtacatttcattggctttgtagatctccaacgctttttccgcgtggttcatcgcaaagtagttttggcggatttcatagtaggcaatcgccacttgataattaaactcggctctttcaatctcattcggtatgtgccggagcctgctttcagcaatccggtaaaaattaatggcgttcataaaccgtttacggtaaaactcgtgcattccggaaaagaaataataatagtattgaatcatctggtctgttttttctttatcggcgttcagctggatcgtttttaaaatgccgtctgttttctcatactcttccatcaaaagcttgtagcgggaatcaattaaattaaaataaaggagcaccgtttgattttgtgtcatattttgcagatccgtaagcagttgttctcttaacgcctcagccgattcagtgttgtgctttttgatttcctcgtaccagtcactgatttttttcgcaactgtttcgtgggccatcacctcagccatctgtcaggacacctccctttcccattttgtgtaataaatatatcatatttacaggttcaaaaagagggtggcagcccgctagtttcctcgtggcaacaaaaaaacctccgcaggtgcggaggcgcatattttataacagtttttttcctaacaaagattccaccagctcgaccgctgttttgccggttttgtttttgtgatcgaggatcgggttgacttcgacaaattcagctgaagtgatgatgtcggcatcatacagcatttccattgccaaatggctttcacggtagctgatgccgccgacgacaggcgtgcctacgccgggtgcgtcgctcggatcaaggccgtcgaggtcaaggctcaggtgaacgccgtcacagtctgacaagtagtcaatggtttcttcaatgacctttgtcatgccgaggcggtcaatctcatgcatcgtatagaccttcatgcctgtttccttaatgtattcacgctcaccttcatcaagcgatctcgcgccgatgatgacgacgttctccggcttgattttcggggcatacccgcccaggttcaccagcgtgtcgtgtccgacgccgaggctgacggccagcggcattccgtgaatattgcctgacggcgatgtttccagggtgtttaagtcgccgtgcgcgtcgtaccagatgacgccgagctgtttatagtgctttgccgttcctgtcagcgttccgatcgcgatgctgtgatcgccgcccaagacgagagggaaccgctcattctcaatgacgctgtccaccttttgggcgagctgctcgttccccgagagcacagaattcaaatttttcagctcttcatcatttttgagtttttcacgattgacggggatgtcgcctaagtcttccaccgcataccccatgtcagataaccgttcaatgagatgcgcgtagcggatggcgctcgggcccatgtccactccgcgtcgtgcttgtcctaaatccatcggcattccaataactgagatattcttgttcatccgtttttccacctcaacatgttgtatgttgtcctgtgcgggttctcaaagatgacttggacacgaaaagatttaaagctctatctgtttttctgactgcttatgcttttttacatacagatgataaacgataacgcacactgccatgaacgggatgccgcaataaagggcgagccgctgttctgaatcaaatgcgaggctgatcagaacaaccgtgtttaacgtcagcccgataataggcagcaccgggtacagcggtgttttaaacttcaggtcttccactttgccgccttcgcggatatatttccgtctgaacatcagctgtgacagggaaatcgtaatccagccgacctgcgcgcttagtccggctaatgataagagaaacatataaacggtttccggcgctgccactttagacagcagtgacaggcatgcgacggccagcgtcacgatcagagcgttcatcggcacgccgcgtttatttattttgccgagcgatttaaaggcttgtccttcgttcgccatggcatataggatacgcgtcgatgcaaacaggcctgagttggccactgagagcagcgcaattaagataacaaagttcataatatcggcggcatatggaataccgatttgttcaaacaccacgacaaacgggctttcgaccactcccgcctgcctccacggaatcatcccggcaatgacgatgatggagagaacgaaaaagacaagcgttctccataccgtctgccggatagagcgcggaatcgttttctcgggattttcactttctcccgcggcaaccccgatcagctccgttccctggaacgcgaagtttacggtaatcatcgtaataagcatagccttaatgccgttcggaaacaatccatcctcataaaaatgagagaagaaaggagcctgctcgccgtgtttcatgtcaatcaggccgaacatggcggcgccgcccaaaataataaacagcagaatgactaaaattttaataccggaaaaccaaaattccgactcagcgaacgcttttgtggtaatggcgttcaaaagaaacatcagtccgacaaacacgaggcaccacacccatacgggaacatgcggaaaccagcggagcatcaattgtcccgcagataaaaactcaatggcgcatgtcaccgcccagccgagccagtacagccagccgaatgcgaaaccgaaagcggggctgatgaatttggttgcgtacgtctgaaacgaccctgatacgggaagggcaaccgcaagctcgcctaagcagagcattgtcaaaaacataataaaaccgccgaccagataagacagaaccgcgcccagcggtcccgcctggttaattgtaaatccggtactcaggaaaaacccggtgccgatcactccgcccaaagaaatcataaacaaatggcgtgatttcattgtgcgctgaagctgattctctttttgatttgtattcactattctgcaccccttcagcaacttgtattggaaccaagccggtgctttgaaaccgatttgctgtccaaagagcctctatttgtatatgaatgttatatgaaattcattttcgtacataaagatacattatactaaaatactgtcgtcacgcaaatagagtgtgctgaattttttatttgtaaattccatacaagccgagggaaagcattgccgcatcaagggtttacgcgttttgaagcacgtttgtgatcttttggatcgcccagtccaagtcttccttggaaatcattaacggcggtgcaaaacggatcacggtatcatgtgtttctttgcataaaagcccttcgcctttcagcttttcacagtacgggcgggccgcttctgtcagttcaacgccgataaacaggccgcgtccgcgcacgtcttttatgatagggttatcgattttctcaagctcttctttaaaataacggccaagctgaagggaacgctctgccagcccttcttcctcaaggacttcaagagatgcgagcgataccgcgcaagcgagcgggtttccgccgaatgtcgagccgtgggaacccgggttaaacacgccgagaatgtcacggttcgccgcgatgcacgaaatcgggaagacgcccccgccgagcgctttgcctaagatgaacatatccggtacgatattttcccagtcaaccgcgaatgttttccctgtgcggccgagtcccgtctgaatttcatcagcgatcagaagcacattttcttccttacaaatggcggccgcttcttgtaaaaatccttccggcggaatgacgatgcccgcttctccctgaatcggttcgaataagaaagcggctgtgttcggcgtgatcgcccggcgcagcgcttctgcgtctccgtatggaattaattttatacccggaagcataggtccgaaaccgcgtttatactcatcttctgaagaaagggataccgcaagcatcgttctgccgtggaagttgccgatacacgcaatgatttccgcctgattatccgctactcctttgacctcatatgcccagcgtctcgccgctttgacagcggattcaacggcttccgcccccgtattcatcggcagaatcatatcttttccggtcagcttggctgttttctcataaaacggaccgagctgatcattatggaacgcgcgtgacgtcagagtgattttatccgcctgatccttcagcgcctgaatgatcttcggatgtctgtgcccctggttcaccgcagaataagcactcagcatatccatatattgattgccttcagggtcttttacccaaacaccctgcgcttcagaaataacaatcggcagaggatgatagttgttcgcgccgtaatgtgaagtttggctgataatttcttgagattttgtgaaagctgacataatctgattcccccttgttttgtaatcattcaacattagatcttgctttccctttttataaagcaagttccgtgccaatccgaaaaaacgggatgtttcgccagcattctttcttttcccgcaaaattttccggcagtttgtgtgcaaacttcagccaagcgcaaaatttttttgcgtttcccgctgacaaaataggagcaatccaattagattgctcctactcaacagttatttattcaattgtctctgatatacaatgtaagaatatagtaaagataatatgatacagccgattgcagccatgaaaatgactgacactctatacaccggcggcaaaaaagctgcaagcatcatgagcatgcccgctaagacaaaaagtttcgaactaaccctgtgtgtatccttccaaacgctttcactgctcagcgtccaaggtgttcttatccctaaaaagaaattaggcttaacgatctgaatgaagtttccaaacaccataaaaatgactcccactataaagtttcctaaataagatatagggagatcatatcccagaccggtcaagatggtaatcagattaatgacaaacagaaccgcaaacattgtattaaatatagccatatatggccggataaatgttttgtagttatttttaggatcaatcttagggatgataaccattaaaatatatagaataatcatgatgccaataagcatcatcatcgcattagctttcgtttggtaatcatttgcacttccgtttaatccccagtgtgtcgccaaattgtccggtaaagatgaatatgtgcaaacccatgtgaaaacagttaaaactatgattcctgccgaaaagagatattttttcatgattccccgcctttcttattatcatgttctgaatcagtcagagaaaagaaccagcctataagatcctgtaatacagtggtatttaatgaatacataataaattggcctttcctctcatcgtgaaccaaatcagtatttttcaatatggtaaggtgatgagaaatactgggttttgacatgtcgaagtgttccgcaatttcaccagccgtcatgtcttgtttctttaataaatccaaaattcttctccttgtaggatcggccagtgctttaaaagctttattcaaaaactttccccctctcacgcatacatgatttagatatttaagtatatatctaaatatcaaccatttccctaaaaaagtcaatggttttattaccttaatttccatttatttttaaacatcgtccaagcgcaaaatttttttgcgtttcctgttcgatttattttaaaataatgaatgttaagacgattgagagggggaattgacctgcacacaaccagcgaattttacacactcgtgttacaaagcattctggaagagattgatgtcgggctgcatgtggttgacgaaaagggcagcaccgtcatttacaataagaaaatgatgcagattgaagatatggatgaacgggacgtcctgcataaaaacctgactgatgtatttatgttttccaatcagcaggacagcacgctcgttcaggcccttcaagaaggcaaaacgattaaaaacgtgaagcaaagctatttcaataacaaaggccaggaaatcacgacgatcaaccacaccttcccgattgtgcaaaacggcgagatcaagggagccgtggaaatcgccaaggacgtcaccaagctcgaacggctgatcagggagaacatgcacaggaaagaacagaacagctacacgtttgacagtattctcggcaacagcccggtcattcgggaagtcatcgaaaacgcgaaacgggcaacccgcacatcatcatcggtgcttttggccggcgagacgggaacgggcaaggaactgttcgcccaaagcattcacaacggcagccagcgctcaggcgccccgttcatctcgcaaaactgcgccgccctgccggatagcctggtcgaaagtattttattcggcacgaaaaaaggcgcctttaccggagccatcgaccagcccggcttatttgagcaggcgcagggaggcaccctgctccttgatgagatcaactcgctcaatctcagcctgcaggcaaaactgctccgcgcccttcaggaaaagaaaatcaggcgcatcggatcagcgcaggacaaaccgattgacgtccgcatcatcgccacgatgaatgaagacccgatcaccgccatttcggaagagcggctgcgcaaagatttatactaccgcttaagcgttgtcacactgatcattcccccgctccgggagcgcaaggaggacattctgccactggccgaagtctttatccagaaaaacaatcacctgttccaaatgcatgtcgattcgatcagtgacgatgtgcagcgattcttcttggaatatgactggccgggcaacattcgcgagcttgaacatatgattgaaggcgccatgaactttatgacggatgaaacgacgattacggcggcccacctgccttatcaataccgcatgaaaatcaaaccggctgacacggaaagcaaagccgccgcaagcacccagcccggcaccgatttaaaagacaaaatggaaaacttcgaaaaatacatgatcgaaaagatcctgagaaaacacggcaataacatatccaaaacggcaaacgagctcggaatcagcagacagagcctgcaataccgcctgaaaaaattcggtctggaccggatgaaatgaatccatacaaaaaaaggctgagttgctcctcagcctttcgtttatatctgattggcaagccgctctccggtaaaccaaaagttctcactcactgccaatgtatgttccgtattctcgacttgatgccaccaatggcgcggcgcgtaaatgatttctcccgccttttgtctgaagcggatcggagacgccttttgcaccagcggtttttgctcaatgtctttttcatcaaagacattgatatttccttcgtacaaatacggagagtcgtccggatgatagaagatccattccttctccccgaaaatgacgccgttccacgcgtgcgtgttgttaaaatcctgatgcagcggtgtgcctgtctgcttagaaccgagaaagaaccatttccagtcccgtcccgtttcttcatccgctctcaatgtgtcttttgtaaaatactcgggtgcggaatagacaaggtctaagtcattttggttcagctgcgtaaaattccagtcacagtaccatttgtcatcattctgatcaatgtactcgatatagttggaaagctttacttgtttaaacgttttgaccccttcgatatctgatttccggatggtgaccattctgtccccatagtgttcgtcaatgtattcaagcgtccacggtctgcattcccagtgatccattgcccccgtcaaaataaaaggtttcttatcagcatactcgcttacaaaaagatcgtacgataactcattgattgtcagtctgtcaatggtcatatccattccccttttattcggcaatctgccgttttttttgtttggcgtaactgtatggacctgaaaagatggtgacgttttgattctcaagccagaaaatcttgttgaacttctccagcaggtttctgtcgtgagaaacgcagatgatggtgccttgaaactgcatcaggctgttttcgagaatttcctgagattcaatatccaagtggttggtcggctcatccaggatcaggacattcagctttttttccattaagatggacagcttcagcctgattctctcaccgcccgacaggacggaaagttttttaaagaccgacgacccgtaaaatccgtacttggccagcatattccgggccatgccctcttcagtcagcagattttctttaaaaaattgcagaatcgtctgactcgaatctccgacgtggctcttttgatcaatgtagcctatcttaagattttctcccactttaatggtgccgtccgacagttctctttccccgatgatgcagcggatcagcgttgttttgccgacgccgtttctgccgacgatgccgattctgtctttatgctttattcgcagattcacattttgatataaaagggaagatccgttggtcacctttccgttttcaatgaacacaatatcttttgaaccggcgcccgcttcctgaaatgcgttttttaatttttgctccgtccggaccggcttattgatcagctcgatccttttcagcgccttttccatattattcgcgcgtctgtgcaggccgacagacggcggatttgagcgattggcccaatctctcagctgggcgatggattccttcatcttctgtatttttctctgctgttcttcatatttctcaaactgggcgatgatgaattcttcccgctttttcaagtattcgctgaatccgtaaggccaaatcttcacctcggtatcgtcaatctcaagcaccttcatcgccgtttggtcggcaaacgttttatcgtgggtcgtaaacagaatggttttgttcgattttttaataaacccttcaagccactcaatcgcatggacatccaaatggttggtcggctcgtccagcagtataacgtcgtcgttgcggattaaaatttcggcaaggccggcttttgttttttcgccgccgctcagctttgaaaacggctgatcctttaattcgctgaggctgagcccgttgcatacctcgtcaatcatcgcatgcatctggtagccgttgttccgctcaaatgtttccgtgtattgactgtatttttccaataaagcagtcagctcgtcatcactcatcggttccgaaagcttcagctcaatggccttcatttcattctggatcgccgcgagagcttcaaacgatttttccagatattgatacaacgtcagatcctcattgggatcagcgatctgcttcagcaaaccgaccttcgcccctttgttgatcgcaatcgttccttcatctgcctcaagctctccggaaagcaccctgaacagcgtgcttttgccggaaccgttcggcccggccacaagcactttttcgccttcattgatgaaaaaagaaacttgtttgaaaatggtatctcccgctaaatttaccgtaagattatgaatattcagcaactcacatcatccctttgtcattctggttcaaagctcgactttattctggatggcgacgctcgctttcagtttgtaaaagctgagcatcataaacagcgacaataagatggataataccccgattgcggtcagcagcaaagctgaatcaaaatagtccgttaagaatccgataaacggaaaggcaatgaacatgaagagcgaggtcatcaaactgataatggacagcagcgtggctctcgttctggacggaatctcattattcaccacctgactggatacgggttctatcacatcatagagcgcgttaatgacgacaaaagctgcaatcgtcacgtacagactgcccgaaggtataaacagataggccgccccgatgatgcagaatgtcagcagaagcacgcgcctcggcgtgaatttttccgccggcttggaagaaaagatggagcacagcgcctgcaagatggacagtcccgcaaaaataatggatatattgcgcacggacagcccttcctgacttaacagatcttgtccgtacatataaaaaaccgatgtaatcgcaaagaaaacggagagtgacagcaccagatatttaaaggctttgttcagcctgaagaaatctttgacttcttttaagatgtcaccgaccgtctgcgtttcgtgttcactgttttcaaatttgatttccgtcagctgtgtaatgaccgccattgcaatcagctgagtgccaatcccggcgataaacacatacgaccatgatatttcctgcaagtagccgccgatgcccatggcgatcgcaagaccgagtatgacaagtccgttatagtttccgatggatttgccgtaccatttttctttcccttgttctttcagtgaatcaaacaaaaaggcgtgatccgttcctgatataaacgtcagcccgataccgtatataatatgggcgatgaagagggcgatgaagttatgaaagctcaggaacatcaccaaatagacaatgaccataaaatggccgagcaagagcgatttttttctcccgattctgtccgagatgacgccgctcggcacttccgccagaaacatcgccaaattcaggactgattgcaggatgcccactagaaacaatgaataattcatgcttgctaaatataaaatccaaattccccgttcgaaaaagaagtttccgaaaaaaccggagaagtaaagcaaatttcgattccgcaaatgaatacccctttccagctatctgcatttaacatcatgaacagaaaggagcccgtcagtctttacactaaaaccctctatacatggatcttgcagatacagacttttcccaaaacaaattgggcaataatgagttgtattctcgaataacccaaaaagttccttctttttttcagatcctacggcatcaatgatcgtttttttcttccctggatcgctgatgtcgcggatgaaatatttgatatagctcagctcatgcatgtaagccggcaggaacaaatggagctcaatatcaaaccggcttttatccatatggtaataatcattgaaatgactgacgcgggagacggacacgtccgctccggcccgtcgaaacaaatcagccagcctttcaatgatctctccgttgggataataatcggcataaacgattcggatcggttcttctcttgtcaaaaggggcggatctttctgcggtgtcctcccgctttcccatataccgatcagtgaatcagtcggtgtgatgatatgccccaaatccccggccagcttttgtttatcaaaataatgctgaatgaaagttctcagcatgtcgtcctttaccttgaaggtaaataacatcggcaaatgattttctttaaaatcagcatactgccgatacctcatgtttgaatgatgaaactgggtgtggcaggtcacgtccgtttgattcgcttcgtacagcccgatgcttttttccagatcatcattcaaaataaattggatggtctgaaccgtgcggtgatccgcggacgtcattttatattgcggattccgctcaaattccagccccttctcaaacgtgcgcttgaatcggtacgggccgttttccggcacatcgcccccggcggtcccaggaatcagaaagctgctctgcaaaacggcttctatttcatcagacggctcgtccaaggtgacttcaaagcgtttttcgcctgttacgttcaccccgagctgatcggaagagacgaggccttttacatacggaacggcctgttttatgttcaggaaactgccgagatgggggctttgattttctttcgtcagatgatagatgatcgtttgaaccacaccctcggcgtcgcctaaatagtccgggtgaatgtccacctgacaggtgcggggatctttgcggatgatccggcagttatagccgtcctgcagactttcatacataatgctgcacatcatcttgcttgtgtaatcctgcgtatctaatgggttcaagcgtatcgggcttgtgtcgatttctatttttagagggtcgcccggttttctcgccgtacgatgcatcgtcttcataaagcgctttccttttgagaaagcttcgtttctgtaatatgaaggccgtcaaagtccaggccgatgcgggtattcagggatttcgggcttccgcctgcaaggtatgtgataatgtcatgagacataaacgaggatataataccgtttgtcgctcctaaggaacctttgatcggttcatcggggtaacagttcagaagtccggccggcatgtttttttcataggcgacaccggattgataggattcaggcgtgagcagaggcccccattggccgctgaagctgccgacacccccggtcataaacgcgatattccgctccttacaataccggtaaacccattcagaaatgttatggggtttgtcagcagcatttatgacgatatcaatttcatacggatctaacacacgcagatcctgcggctgtgtaatttcctgatggtaaagtgctgcgtccgcatggggattgatacccgcaatataatctctgcattctgagatctttaatttgcctacagaagattgattatagacgaattgtctgttcaggttatgtactgatacggcatcgaaatcaatgagaataaaatgctgcatgcccgccgccaaaaggttttgaagaatgatcgttccgacgccccccagacccacgatcgctgccctgctgccgtctaatctgttttggatcagattggggttttggttgtatttctcaaaatggtacagctgcttttcagtgatgcggccttcacggccgttttgccatggctctattaaagcatccaatttcattaacgcatcgaaaaactggtttcccgcttcctctcccagaagatcagaaagctcttgtttttcacagccgatgatcagccgttcaaccgcctctttgatctcactcgtatgcgcaagcttaatcgcctttcgatattgaatgataatatgcgccgtgtaggtcagcacctgcacgctgtctttaaacttccagcgcttacagtacgttgacatcatgacataccccctgaaagataataactccccaatgaggggagtcacggctttactagcaacgatgcaccaagcttgctgtttctgtatcaagatcaagttcttcaatcttcatcagtacacaccccctttaccaataactagatattatcatcaatattggaaaaggacaagttattttttgaaaatttagaatttatatataaattgtgatttttcttccttctgcgcggtttatcccggcagccggatgatgaaaacggagccttttccctgctcacttttcacttcaattgttccgttatggctgtcgataatggtttttgtaatggcaagacccagccccgcgccgccggattgacgggatcgggaggtttccgccctgtaaaaccggtcaaacaaatgaggcacatgctccggagcgattcccgttccgttatccgcaatcataagcatgattcctccgtctttctgcagggagacggtgatgacacccgtgtcttcatccgtatgctgcaccgcattgtaaaagaggttgagaatggcctgcttcattttgtctttgtcaaaaacggcttctatcttttgatcaacaaagaactcgagcttccggtttctcgcgagcagcttcagctgagcctccatttccaaaatgacgtctcccaatgcgccttttttcatttcaaagctcggcacccggtcaatctgcgcgagaaacagaagatcctctatcagcttattcgccctggcggattccgcgtacatgctttgaagcgctttttctttctgctccggcttctccgccgctccgcgcattaaaatttcgatacagccgtgaatggaggtaagcggcgttctcagctcatgtgatgcgtctgatacaaactgccggatgcgctccttcgcttctttttccgcctgaaaagaggtttcaatccgttccagcatctgattgatggagatgcccagcgactcaatttcggcctgcttcctatcgatcggcagccgtttatcgagactgccggcagaaatgtcacccatcatacgcacaatgcgggacagcggcttgagtgtgagccggatcaccggcaagaaaacaaacagtccgatgaccaaagccgcaaaggaaagcaccgcgaaaatgctgatctggcggaaaagcgaatcattcaaaggctgtgtcagcgtgctcatctgcacaactcccgcctgccttccgtcaacggaaatcgcctgaaacacgacgatgatttcctcacccgcctcattgtgagccacctgatagtgaagcgccatggtgtctgtcagcgcatcccggtacacttttttcgggaaagaaggagcggcccccgcgtgcgggtcttctgataaaacagacatcttgtatgattgattgataaaagcaaccgtcaccccggggtaaatcaaattcggatgagccggtgtttcggaacgggcaagggttttgattgacctccatacgctttgatccattgaattgatatcactctgaatgctgatcgcctgattttcatacatcgtccgtgtcataaacatgtactgagtaccgccgatgaaacataacagcaaagccaaaatcgccagtgacctgaacaggagctggaaccgcagggttctgtacagccgtttcatgccagattcatcctgtacccggcgccccgaaccgtgcgaatcaccttgtgttctttatccttcagcttttcgcgcaaagaacggatgtacacctcgacgatattgtcttccccgaggaccgttccgtaatgaagccccatcgttaaagaatcaatgagcgcagactcgccgtctgcactcagcttgatgcctttcaacttttccatgatgcagtctctccttagatgtatcagcctgtgtttatttttttcgcttccccttctattattcgcttttatctgaaacaaaacggaatctaagctgaattggtgaaaggaaacgctgaaaacggagcaatctgcaaataaaaatcattatctgccgcttcaattcagcagcaccagttctaagttcatgtctgcctttttctaaatatacccatttttaactgaacgtgttgtgacccgcgttcagttctttttttatggcttctgaaaaaaggcataaaaaaagcgccctgaaaaaggacgtttaatataacatgtttcatgttcttaaattctgcattctaaaataattcttccttcacattcaccttcaatttcattcaatacgatgatcacatcagccgttttcatgtgtttcacctcccgttttcataatagtataatattaacaaataaatcaataaaaaacagcccggatgtccgggctgttttttatttctgtaatcgatccgcttctgtcagtttgacttccgctgtttttttctttcccgaacggtagaacgtgatgttcacacggtcgccgatctttttgcgatacaggcgctcacggagatcaacaacgtcattgaccttatgtccgtcgaacccggtaatcacgtcgagctttttcaaacccgcttttccggccggtgaaaacgcgtcgacacccataatgaccgccccggttttaacgcctttcggaagtttcagcgtctggctccaatggtagctcgcaatatccgttaaggatttcatctcaataccgaggaaaggccgtctgacttctccgtatttttctaaatcctgaataacgggaatgacaagctttgacgggatggacaggccgatgccttcaacggcggattcagcgatcttcattgagttgatgccgaccaccttgcccgatatatccatcaaagcgccgccgctgttgccggggttaatcgcggcatcggtctgcagcacttccgcattccaatccggctgtccgtcgccgtttgagtcaacgggcaccgccctttccgtgcctgaaatgatcccctgtgtcactgatcccgcaaattcaagcccgagcggatttccgatcgcaatgaccggttctccgactttgacctgatcagaattgccgaactgggcggccgatttgattttatcagacttcaccttcagcacggcgagatccatcagacggtcgctcccgatcagctcagcaggcacgcgcgagccatccttcaggctgatctcaatctcagtcgcaccttcaatgacatggtgattggttacgatataagaagtgtttccgttctttttgtaaatgacgcccgacccgcttcccgcttcgccgccctctccccaaatatcggtcttttggatattgagaacaccgactaccgaatctgatacacggctgaccatattcgtgacagcgtcattgacatttacgttgactgttttcacctgttcgctaccgagacgctggctggtgcttttgctgctttctccatggtctccgcctgtccagtacggcagcaggaaagccatgagcgcggccccgacgatgacgccgatcagacttgatagaaagtaccctctcttgctgcggcggggctgttcggaggcgtactgttcatcatcgcgattataatccaccctatctcaaatcctttcaagagtactcgatttgcttatagtgtgggtcagatcgcggattaataatcatgattcatttggaaaaattacacggcgcacagcggcgtcgggattttcggatcggtatcaaataactgaaacgtttccccggcgacaaatcctttcgcagccaatgtctgctgcacggacattctcgccagttccttcatattgttgtcttggctcagatgcgccaaatagatgcgcgatgtgccgtcgccgatgacatcagtcatggcgagcgccgcgtcttcattggagacgtggccgacatcgcttaaaatccgccgcttaatgctccatgggtatctgcccatttgcagcatgccgacatcatggttgctttcaaacacaaacacattggccgaacggataatgcctttcattctgtcgctcacatacccggtgtccgtcatcagcgcgagctttctgccttggtagtggaaaacataaaacatcggctcggccgcgtcatgggagacgccgaatgactcaacatcaagcccgccgaaggatttcacgctttccatcgggaacaaaaacttttgtccggtatccagcttgccgatctgattctccatcgctttccacgtcttttcattggcgtagacgggaagtccgtactttctcgcaatgacgccgagccctttaatatggtcgctgtgctcgtgagtgacaaagatgccgtcgacgtcgtttatcttgcggccgattttctccatcagcccgtccatcgctttaccgctcaggccggcatccaccagaaaagagtgctcctctgtctccagataaaacgcgtttccggtactcccgctcgcaagcacgctaaattgcaagcccattgtgtctcactccattatttattttgattgttatcaatgactgtgctttccaatgcattcacagtgtacgtttgctgtgtctttttcttcgtcccttttgacttatcttcgattgtaattctccataccggcgccagcacctgcgtacttgtcagcggatattgggcaatatagccgaacttaacgcttttaacggcgcaattcgcttttaagtaattttgagaatacaataattcgaccgcatcaagctcaggaatcaggctctccgtctggattcgcttgaatgactccagcatggtctgctcgtaagatacgacctcgtttttatcgttcagatgcagaatcacctgtccgatcgcatccgtggacgagtcaaaatcctgataaataaactgtccgtcatacgtctggtaaaaaatgatctgttttttatccttgtcgactttccacagtttatatttttcaccgccggttattttagagctgacgagcgattccgcatcctcctgcggtttttgcttcgataaaccgaccggatcggtaaatttcattttcagtgtggtaaccttgtgatcatcctccggcatctccattaaaggcttttgatctttcaaagcatcaatatcttcagcggtaaataccttttggcccgccgtcagccggtagcccgtcgcggaatcagaagacaggttgccgaaagtgatatgatccatctccatgtctttttccacatttgaatttttaatcacttcgtattcactgctcgagcgtttttcaaaaaactgatagccgagaaaaatatcgaggatgaggaaggcaatgatgaagatcgtttttgtcttattccactccattatcgtcctcctccttccccagcagatctttcgtaatcgggacgatcttcccgttgattttcatactccagacgggttccagttcaacaagatcattcgttgacgaagataccatttgataggacaggaagatctggtcgattttattcacgtcgtatttaacctgctgctccagcaaagacacaacctcattgccgctcatcattttcacgtcttttgttttaatcggattcggtccgagaacatagttcggccgcttgtagctgagaacctcgtcattggcccattgcagggtcaaaacaggtccggatccgaaaggcttagacgtgctgttgatcacaggcatttggtctttaaacatgtagaaactcagctgctggttatcactcacattgaaaaattgataatgatccgtccagcttcccgtatcctctaaatatttatagcttttcttaatcagctcacccgtttggtaagaagcgctttgtgccaggttccgatgctggaattgaatctgccgctgtgtcgaattgatttccagacggctgattccgtcagtcagcacattccgattgtaattcgggtcttctctgaccgtgctcggatcattaaaaagcgtctgcttaaacaggttcgtcttaatggtttcagtgataaattctttttccttcatattaaaccgcgcattcggcatgagaaattctttgctttttccgaccgaatagaggtggtataacggcatactcgactttttgctgtacagctcattcatcagattgcggtaattcgccgattccacagtcacttccaaaatcagctgcttactgtacgagaccatgtaaatcttcttattcgtcttattctcattaaacggaatgacaatatggtcaaatgagctgtattccattgacggattcgaccatttaaacatcgtttggaagaaatcaatcggaatggtgtcattgaattgcagatcgagctttgccgaattgccgtttctgccgtaaagccaatttttaaaaccgagcttgtcgtattgatcggaaatatccttcatcccttttacttcccattgcggcaaatccgcccacaggtcattaaagagcgtctcatcatccactttgtaatgagagccgtttgtatgaataaacatatcccggggttttaccgtttgcgacactttttggctcgttttatcaattttatgcttttcccggacagtcgatttggttgaggccgtgccttctgaaaaattgggctggaatgtccaaattccccatgttaaaacaagactaatgacgaccagcactgacagtatgactgtttttatattttcacgcctcatcccaatcatcctcttgctcttctttatatggaagagtaaatgtaatcttcgttcctttgccttctacactgtcggcccaaatgtctccgccgtgcgcctgaaccatctcttttgcaatcgcaaggccgagtccggtgccgccgagttttctcgtgcgcgctttatccactctgtagaaacggtcaaagactttttccacatcttttttcggaatgccgataccttcatcttttacgctgatataaagcagctcttctttctcattcacatcgactgagaaagtgacatgtccgccttccggtgagtatttcagtgcgttagaaatgatattatcgagaacctgcgtcactttatcctgatcaatctccacgtacagatttctgtccggcagctcgcggataaattcgacatgctgttcttttgtcatttcaaaacgatcgataatcagtgacataaagcggatcatatgaatccactctcgattaaactgataatctttgctgtcgaatttagaaagctgaagcaggtcgttcaccaatctgatcatgcgctcagtctcattttgggtcaccattaggaaacgcggagcgatatctttattttcccacgcgccttctgcaagcgcctctaaatagcttcgcatggtcgtcagcggtgtccgcagctcatgagacacgttggcaacgaactctctgcgttcccgatcgagtttttcctgttcggtgacatcataaagaaccgcgattaaaccgtcgatttttccgtgctctctctgaataacggaaaaattcacccgcagtacagtcgtttcatcgtcacgttcgatctccagcagcattgaatcctgctgttctactaaatcctcaaatgtaaagttctcttttatgcccaataaagacgtaatcggcatctctaaagccgtttcacgtgaaacattcagcagctcaagcgcagggctgtttaaaagaataatagctccattgcgattcgttgcgatgacaccgtccgtcatatacgcgataacggaagaaagctttcttctctccccttccgtcatggcttgggcatcttcaagctctctcgtcagatggttgaacgtcgttgcgagctgaccgatttcatcatgcccgtatttccgcacctttctggagaaattcccttttgccagttccatcgcctgcttacgcatatccgacagcggatgggtaatggtgcgggcgagaaatataccgagaagagccgtcagaacaagggctaagcctgttcctgaagcaagaatcgagttgacggttttcatctggttaaaggtatcttccatactggccacgacatatatcgcgccgacaacttcctgattctctgtgacgacaggttttgctgaaatcagcactctgtttttgcttttaggatcataatatttttttgaataggcctgttttgttgagaaaatccgtttaaaaatcgggtcagtcgtctgtttccccgctatttcctcgccataaggcctcgaggaaccgacgacctcatagcttttatcaacaaatgtaatctcccgtatttcattattcttcgtaaaatcattcaaaatccgtttgacgtcatctttaatgacggtgctgtcattatctcctttatattcctgctcaatataataggaaagattgtcaatccgctgatttaacgataattcataggacttgagaagagaattctccacctgtttcacaaagtacacgccgataatctgcatggcgatgataatgagaagcacatagatcagcgtgatcttaaactgaatcgaccgaaaaaaaccaaccttattcatcgccggttagtcctgttcagggtttctcaagtaataaccgacaccccgtcttgtgacgatccagttcggatggctcggattatcctcgattttctcacggagacggcgcactgttacatccaccgttctcacatcaccgaaatagtcatagccccacacagtctgcagcagatgctcacgcgtcataacctgtccgatatgtttggctaagtaatgaagcaattcaaactcacgatgagtcagctcgatcgtttcttctctttttgatacgacataagcgtcagggaagatgacgagagaaccgatatgaatgtcattagaagctgattcttcctcagccggcgcaaccgtaagctggcggcgcaggttcgctttgacgcgggccagaagctcacgcgtgctgaaaggcttcgtgacatagtcatccgctccgatttcaagcccgatgaccttgtcaatctccgagtcttttgccgtcagcataataatcggcatatcatattttttccggacttcccggcacacttcaactccgtctttattcggaagcataatatctaaaagaattaaatcaggctgaagctcctccaccatttccacggcttcgtttccgtcgtacgcacaatgcacgtcatagccttcttttcttaaattaaactctaatatatctgcaatcggtttttcatcatcgactacaaggattttcttatccatcatcttgattttcctcctgccagaatgacttcatttcatctattgatgtttcatgatgatcacaattcggatcgtgaaaaacgttccccgtctattataacggtttcaggtcaaaagataaaaaaattaaagagaacagcgcaaaaacgtattgaactgccatccttttgtcatgttttttattttcttttaaaaaataatatttttttgaaacctcacgaaaaaaaacgccgtctagtgtttgacgtcttcttctgggccggctgaaaagccggctctccctttttttataacaaaagaaaaaacgcacctactattgcagatgcgtttgggtaagtggctcgggacggaatcgaaccgccgacacacggattttcagtccgttgctctaccaactgagctaccgagccagatgtttcttttctatactataaagtaaagtaaaatggcggtccggacgggactcgaacccgcgacctcctgcgtgacaggcaggcattctaaccaactgaactaccggaccttacagtaatttgtccggagagccgtatcgtggcggtcctccgaggacaaataaggagttagcaataacgctaaagtaaatcaatgacccgtacgggattcgaacccgtgttaccgccgtgaaagggcggtgtcttaaccgcttgaccaacgggccataaaaagtggtgagccatgaaggactcgaaccttcgaccctctgattaaaagtcagatgctctaccaactgagctaatggctcctgatgtgtcggattatgtatcatagagcattcagacaaaagctttcttgcagtactctattgaagctgttccgtaacaacgagatttataatatcatagaacattcgaaagtggcaactacttttttgaaaaaaatctattatttttttcctgcataaaaaaacaagcctccgtgaccggaggcttgtttgctgcaaattcttagttagcgcggtatacactgcggatgacgttcgtttgtgaacggtcgggaccgacagagaaaatagaaagcggaatacctgtcagctgagatacgcgttccagataatggcgcgcattttcaggaagatcgcttaatgtttttgcgcctgtgatatcttccgtccagccaggcatttcttcatataccggttcacactctgcgagagctttcagacttgccgggaattcttcaatcacttcacctttgtagcggtaagcgacacagattttcaatgtttcaatgccagtcagcacatcgattgagttcagagaaagatctgtgattccgctgacgcggcgggcatggcggacaacaacgctgtcaaaccagccgacacggcgcggacggcctgtcgttgtgccgtattcgcgtccgacttcacggatttgatccccgatttcatctttcagctcagtcgggaaaggaccgtcaccgacacgggttgtgtacgctttagatacaccgacgacgtgctggatttttgtcgggcctacgcctgaaccgatcgtcacccctccggcgaccgggttggatgaagtgacaaacgggtatgtcccttggtcgatatcaagcataaccccttgagcgccttcaaataaaacgcggcggccttcatccagcgcgtcatttaatacgacggatgtatcgcatacatactttttaatctgctggccgtattcataatactcatccagaatatcttcaattttgaagccttccgtttcatacattttttcaagcagacggtttttctcttcaaggttccgttcaagcttttctgcaaacacgtcacgatctagcaggtctgcgatccggatgccgatccgcgccgctttgtccatataagcaggtccgatgccttttttcgttgtgccgatcttattggcccctttgcgttcttcctctacttcatccagtttcagatggtatggaagaatgacgtgggctctgttgctgattctcaagttatccgtgctcacattgcgttcatgaagatacgcaagctccgttatgagcgctttcggatcaacaaccattccgttcccgatgacacacgctttttctttataaaaaattcctgatgggattaaatgaagcttgtacgtgacgccatcaaacttgatggtatgtcctgcattgtttccgccttgataacgtgcgatcacttctgcattttctgataggaaatctgtaattttaccttttccttcatcgccccactgcgtacctactacgactactgaagacatatatccgtgcacctccgttaacctttcaaaacgatatctcattcaaacaaattaagtgtatcagtgccgaaacagaaagtcaatcgtaaatccgaacatttaaatcttatcaatctatgtttgttcgccttaaacatgattaaaagcgttttctctttcatttgctatctattactcccgaaactttcatgctttaacaagaaaaagaacccgtaatcagggttcttcagacagtcacttatatgccgcttgtattcatcaggacgacccgccagccgtcaggatcttcgatggtcacgcctttttcttcccagtacgggttttcgggtgctttctcctcatatcccatctgctttaatttcgtgctgatgcggatgacctcctgctgattctggatgtaaaagacaagcaggctgtcgccgtgcggaacgggcgccggctgagacgcgccggtttcttcggtgaattctaagtgatattgcgtatggggcaggccgaacatgacgccgctgtagccctcatgtccggaaaaactgccgactctcttcagcccgaggccctcttcataaaacctgatgatttccttaagctgtccggtcggccgggcaatccggatttgcgccgcttgaaattgcggaaattcaattgccatcatcatccctcccttaattccattatataaaagtgctttccttttttcgtctgccgaacggacggcattctctcattctttcggatgaaaaaaagcctcaagacattgcttgaggctttacgcacctgccggaacaccgccgtcatcaaagcgcctttccaggtttacgaacttattgtattctttcacaaaagccagtgagacggtgcccaccgggccgttacgctgtttggcaataatgatttcgatgatgtttttgttttcggattctttatcatagtaatcatcacgatacaggaaggcgacgatgtcggcatcctgctcaatacttcccgactcacggatatctgacatcatcggacgtttatcctgccgctgctcaacaccccgggagagctgagacagggcgatgaccgggacttcaagctcccgcgccagcgcttttagcgcccgtgaaatttccgatacctcttgctggcggttgtcgcttgaacggccgcttccctgaatgagctgcaagtagtcaattaaaatcatgcccaatccgttctcctgcttcagtctgcgacattttgaacggatttcgctgacgcggatgccgggggtgtcatctataaagataccgctgtttgacaggcttcccatcgccatcgtcagcttgccccaatcttcttccgtcagatttcccgttctgagattttgggcattaatattcccttcagcgcagagcatacgcatgacaagctgctcggcacccatctcaagactgaatatcgcgacgctctcatccgttttggtggccacgttttgcgcaatatttaaggcgaatgccgttttccccacagacggacgggccgcgacaatgatcaaatcattccgctgaaaccccgccgtcatccggtcaagctcaataaaaccagtcggaatcccggtaatatcgcctttccggttgtgaagctgctcaatgttgtcgtatgtttgcacaagcacgtctttgatattttggaaggcgcccgaattttttcgctgcgcgacctccataatcgttttttccgcatcgcttaataaatcttcaacttcatcctcgcgcgtatacccgtcttgagcgattgaggtcgccgttctgattaaacggcggagaatggatttttcctcaacgattttcgcgtaatattctatattagccgctgtcggaaccgaattcgcgatgtccgtcaggtaagagacgcctcccacctcttctaacaaatcggtattcgcaagctctgacgttaccgtgaccaaatcaaccggttcaccgcggtctccgagcacgagcatggcattgtaaattttttggtgtgacattctgtagaaatcatccggaatcaacacttcagaagccagtgttaacgcagacggctgtaaaaaaacagcacctaacacggcctgctcagcttctatgttttgcggcggcagccgatcattcagaaggtctgtcatgctaagcaccgtcctctccttaaaaaatatccaaactccattttaccatttctcaagaaaaagaatagaaaaacatcactttccctgtatttgtcagacagcggctgcgtgtttcaccattccgaatgctgggaaacaaataaataaatcgaaaccaggaggtaagaaggatgaaaacatatgcagtaacacccaatgttgatgcggacggatggtttgtgaaggttgaaaatgtggcgccgacggctctttatacatcaaaggacgcggcgatcgagaaagcggagcagacggctaaagagaacagcccgtctaagcttgtcatttatgatcagcataaaaacattgaagaagaacgatccttttaagaaaagccttcgcccgagcgagggcttttcttattcgatgaaacggatgtgcagcaccgtctgcgccatgagatcggccgttttttgatacagctcccattcttcacaggcggcgaatactttcatcatgtcctgcaatgtctgtttcagtatgataaattcgtcaattgtacgcagttctgcggcttttttctgataatcagccagcttcagctgtaataacatcaatggcgattgcataaaaaacctcccccattctgttataaagccccgcttttcaaacctccattcctttgtcatatcctcttacgatagatttctgattttagtacaataaagaaacggaaggagtgatcacatgaaaccgctgcaaatttccgccgaaacggcgcaaaagctcgcagaatcactgaatatgccgcttgagagaatcatgcacatgcctcagcacattctgcttgccaaattagctgaaatccaaaaagagaacgatcacaaataaaggctgctctctcatatatatgtgcgggaggcggaagtgatggctttccgcctcttttttcgcggagaaaattttggtaaaacgttctttgaacggaaccgatccgattttaaccgtctcacagctgaaaaaacttgttgacgaaggaaaagtgaaacatttcttattatccggaaacaattcaggcaacacaaagcttgtctcatggatgaaaaagaacggcacaaaaatctcagctgaccgatacagcaccggaaaaacaagctcagcccggcaaggaatgacaggcggcccgggcggacaaagtcagcagactctgtatgagatgaaaaaatagttcggaaagaggctggatagttaaacgccggcctctttattttgctcttgaagcacctgccatgcggcgccggtatcattcagaaaaatgattgataaatcctttctatttttgaaaccatcagttcctgacgcagatgccggccggcataggagcgcgcttcttttccaagccgttccctgagagactgatccgtaatcagcattacgagagcatcagcaagttcgcggctgttgccgggctgacaaataagccctgtgtcctcatgccggatcatctcagggattcctccgcagtcagttgcgacaatggcttgacctgagaacatcgcttcgatgatcgctatagggaaattatcattcaatgtcggcaggacaaatatagatgattcagccaaaagcgccggcacatcacgtcgttttccgaggaaaaacacatttgagaggcccagtttccgtctcttctcttccagaaaccctctcatgtttccgtctccgatgatccatatatcaactccggataaatggtgccggatgcgggcgagagcgtccagcagcacatcatgtccttttcgctcggtcagacgggaaacgcacgcgatcacgagcttttcagcacgttttgactcaggggcaccctgaaggtgaataccggtatgaacagtcttcagctgggcctccttcgctccgtactccagcaagggctcgtgaaaggagtcgctgattgtaatgattttatccgaagcccgaataccctgcctttctatttcactgaaatatgcctcttctattgaacccttttggattttatgaaacttcatccggcttttcgtaaaatgtccgtgcggcgtgaaaaaaagaggacgctggtacgtttgattaaggtatcccagcaaaaataccgcaaataaatcctgcgcgtgaaacaggtcatattgttctaagtctttctccttcaaaaatctttgaaagacatgtaaatagctgagattcttcacaaacttttcgtttacggcgccgtatctgccaacaagaaacgctctgatctcgtcagcggcccgcgggatatcttcctgaaaaaaaattggcggcatttggagcggcgagatgacatccgcctgatgaccgatgcgctcaaaacccgtcttaattgatgtgatataactcgccaaccctccgacattcgggtaacggagaaaggttgcgtacagaatacgcaatggcttttttcgtttgtgggagctttttccttccgcacagaacgaatacagcatctctggctcaccttgatgttcgatcccgtaaaattgatccatgacgcgcaataaggctagaggcaccagaccgttcggcttgccgatctcttctttcaaatccgctccccctctctcaaacttataatcctaattcccgtccccattttgacactttgtcaacatgatacggcagcagttctcctccccgattgtcgaagattctccgcaattgggtatgaagccctttttcaagtgttctctgcaaataagccattttataaagcgtcataggaggggtctgaaaatgaatgccccgctttttcatttctttcgtatacacttttacgcaatacgtccgaatatcttctgcgtgccggctccaatcttttctgaagccaagcagaatttcaaccagcaccgtcatatcaaaccaaaccggcgcgtattttgcggattcccaatcgatgaattgaatatcccacggttcatgcccggacgcatcgtgggtgcagatattctgcatatgaagatcaccgtgtgtgatggctgagccgttttgtatcaattcagggaaaaaatccggctcctcctgctcaagcaagtttgtgatttgccgataatgaggcttcacgatatcttttgtgcgctcatctttaagagccctatccaataattccgctgtctttttgatctgctttttacgcccttttctcatggtttccgattcatataccggcagccacgaccgccatttaccgtcagaaatattcttgttttcaaaggtgcggctgtgcaattctgcgacagacggaataatatacttgaaatgcttcgggtgaaatgtaagctgtcccctgatctggctgacaaactccataaatatccacgtttcatggtcactttcttctataagatagatgtccggcagcaaatcccctaaaacggaacgggctttcccgtatatattaatctcgaccttatttttttcacgggaagatttatataccttcaatatcagcggaacagttccggattttttctttacaaacagtttataaatggcgcttctgtccgtcgatttcaggcatgtgatgtcatccggattcaccgcagccctttcaccgaacgaatacgacagtttttcgtcaattctcagtttttgaaatgcgccatacaaaagatccttttcatacatgccgatcttccttccgcttccgtttccagctgtttttgagatgagaccaagtgtttctgataaatggcatcgggtcattccaagcaaaaagagcgtactctttttttcctttacaccctttccaaaaatcccggaacgtcatttctcctctttttcgtttcttcaaaaacgttaagaaataacgcacctcataaatccagttgattccgtctttttgttcgagctggggcttcacatgttgtccggtcaaatacagatagtacatgtaaacgaaatgaacgcctgccggttctgtcaggctatggctgagccaaaagcgcggattaatttcgataaacttgtaaacattgtcccggggatcctttttaaattccgccatgcctactcccttcagctgaatcgcttcaaaaaacggcagggtcttctcgattaaatcaggaagccgtttgctgacgacgtgggcccccgcgccaaaatctgcagggaattgatggttcttttgcagagagaataagcccattaatttcatttggtcatcataaaaagtggcgactttataaaaacactggttgtctccggggatgatctcctgcacgagcagttctccattttctctgtaggagctgaactccttgcgcaattgtgcggcatccttcattacaattgcttttttgtttactttttttctgtattcatggccggccaccggttttaaaatacacgggaagtcaatattagcgatggcctcttccagctcatcccggttgttcggaaaaaaggttttcgggcaggggatgtgatgcttgaccgctaattcatatgctttgcttttatctaaaaccgtttctaacagagagcggctcgggagcaaaaataaaaaaaaaccggctaatgtctcgcggaatttagatataaatcccgcataatcatcagatcctgcgtacagaaccggctttgcttggaaccgcttcccgaaatcagtcagaaatgtcagcagttcttcctcttgtgttaaagggctgggacatatcccgcaatctgccaatcttgattttccgatacgataaggtccctccgtgtcaaacgcgtaaacatcgattcctcttcgggccaggctgcgaatgatcccaatcccgtttgcactgaaatcaagtacaacggctgcatgttcatgtttcatgatctccctccgagctgttgttattttgataaatcgattcgatattttttatcatcgtctcactgcttaaatatttctccgcgtaggcctttgcgtttgaagcagccttctcccgcgcagatttgttagagataaaaaacgctaaagcccgggcaagaacctttgcatttcccggctcgacaataagtcccgttttgttatggcggatcagatccggaatacccccgcaatcggtcgcgatgatagccgagccgctgaacatcgcttcaataatcgaaataggcagactatcattaatggtcggcagtacgaatatgtccgtcatattcaaaatagcgggaacatcatctctttttcctaaaaaggagaccatagatagattcagttttcgagcctgatcctctaaggcgctcctcatctctccgtcgcccgcgattagcacttcaacatgttcaagtacatcagatggaattctcgaaagtgcgtccagtaaatatttgtgaccttttctcggccctaatcttgcaatacacgagatgatgatcttatttttcggtaccggggtttttcttttcccgcctgtttttgcatcgtaatcgattcctgtgatcaccgttgtcatgtctttctgttcggctccgagcttcatgagcgggctgcggaacgtatcgctgataataatcaggcgatctgcgtattcaatggctttcatctctagttttttataataaaactcttctaccgatccttttttaaagatgtgaaatttaagtctgttgaaagtaaacatgccatgcggtgtaaaaaataaaggtttcttatagatttgattgaatctgcctaatatattggctgtaaataaatcttgagcatgaaacacatcatatttttccagatgaatcttttgaagcatttgctcgtatataaacatcagccgattattcttcaaaatatgatcactgtaatccccatatctgtcactaaagaaatcttttaatttcggaacaacatccgcccgcagttcttttacctgtgcggacggaaacagattaggggatatgacatcgaccttatgacctctttttttcagtccttcactaagcgttttaatatagtttgataaaccgcccgtgtgcgggtagtcccaaaacgtggcaatcaaaatggataacttctgtttttttccgtataatcgcggaatatgatgtgcatttttcatctgagtctttaccgccgtctttttttgcgggcgcgctttgaccccgtagtagcggtcaagcgtctgaatcatatacggatacgggacggaaaatgtcttgatcatttccagatcctccgcacgacttcaaaagcttcggcgtattccacacccgccgtcattcctctgactcttcctaaatgtgtaacgccttcatatgaacggggatgagggtaatccctcatttctacgtcatagtggtgaagcgccgcgagtttggcatccattgtgtctgtgatgttaacgaagtaattaggcttgaagagtttatcagccgtattcctctcccactcgcttgaagatagcgtttcaaacgtaagcagttcgataggcttttgattcggaagcggtctggcggctgttaaaactgcttggaatgttctctggtggtccatattgacatcgccgtaatgatgtgtaaagattttttcaggctgatagacgcgaatgagctgctctaattctttgacaagcttatgaagagggatacattccagctctaaattcgtgtgctccaaaaagatgactttctcaattccaagctcttgattcgcgcgttcgcctaattgtttaatatgatgagcttcttcttttcttcctaatgccgtaataacggaaatcactttatatccttcattgatcagccgttttatggtgcccgctgatcccaatagttcatcatcgggatgagcgccgataaccataatgtattctgccattttttccacactccaccaaacaaatgttacaaatatcatatgacgaccctaaaaaaaggaaacttacatatgcggattttcagaaacttacatgtgcggctgccattccaggtaacgtgacggatttaatttttttatagtgttcaaaaactcatccgccaagccgtatttgtccagtccttttaatagttttacgggaaaccgggtaatggcggaaaaagctcttttatggtcgatgaccttaagatttccgtgttcgttgatcagaatgtgcctgatttcggcatcccatctggtaaaaccgattctttttaattcatccagcatatttaaaatatcagcagtcagtttgacggacagggatttttcttgtttgatatggcgggcaagagaggtgccttggacatattccatcacaatataacgatctccgtattcatacagtcttggaatcaccggggaaccttgtccggtctttaaagctgccaattcctttttgcatgtccctttttcaaagaagtattttacgcatttgttgtgtgttaagcgatagacttccccgtcttttccatcaccgatcagcggatagtgctccagcgcctttttattctccggattattaaaatatgtttcagaaaaaaatcgtttcataccgacacatccttcgttatgatgtaatataatatgcaatctggtgatgatcggaaatgaaacaatctcatcattttcttgcgctgcgccgtctgctgacatgaaaaaaacccgccggatcggcgggtttttcattgtgtattacgcttcttcttttacgtgaaccttcagcacagcctgaacttcagggtgcagctttacaggaacgtttgtatatcccagtgtgcggataccgtcttggagctccaatttccgtttatccactttaatcttatgcgttttttgcagcgcttctgcaatctgtttgcttgtgacagatccgaatagacggccgccttcaccggatttggcactcagctcaacagtcagctgttcaagcgtttctttcaaatctttggctctttcaagctcggcaatcgcttcttttttctctttttctttctgtcctttcaatgcgctgatgtttgtcgcatttgcttcgacagcgaggccttttttaatgagaaagttatgtgcataaccgtctgctacgtttttcacttcgcctttttttcctttaccttttacatcttgtaagaaaataaccttcatctctgaacgcctccctcaaaatattcatcaatggcttccttcagccggacgagcgcttctgagacagaaatgcccgataactgggttgccgcattggttaaatgccctccgccatccagcgcctccataataatctgcacattgacctcgcccagcgatctcgcactgatgcacaccgtatgctcatcccgtctggctaccgcaaatgaagcttccacttcactcatcgataagagggaatcagccgcctgcgcaatcagcacctggtcaaagtactcctcttcgttctcaggaagagaagcaatcgcgatatgttctttataaagagacgtatgctggatcagcttcgcccgcttgatataagaaccgaccgattctttgagaactttctgcaccagaaccgtatctgcgcctttcgctctcaaataagaagcggcgtcgaacgtccgcgagcccgtgcgaagggaaaagctcttcgtatccactattataccagctaacagggccgtcgcttcaatcatattgattttgagccgcttcggctggtattcaagcagctccgtcacgagttctgcggtggatgaagcatatggctccatataaacgagcagcgggtctttaataaattcctcgcctctgcggtggtggtcaatcacaacgatgtgctcgattttgttcacgagacgctcttccatcacaagggatggtttatgtgtatcaacgacgacaagcaacgtgtcgtcatttgaaatttccatcgcctcttccggcgtgatgaaccgcgaccacagctcttcatattttttaatttcttcaatcagacgctgaacacttgatccgatctggttcggatcaatgacgatgtagccttctttgccgttggcctgcgccaccttcaatattccgattgcggctccgactgcgtccatatcaggaaatttgtgccccatgataatgacattgctgctttctgagacaatttccttgagcgcgtgagaaatcacccgggcgcgcacccttgtgcgcttctccatcggattcgttttgccgccgtaaaatttcaccttgccgttcggcattttgatcgccacttggtcgcctccgcggccgagagccaaatcgaggctggactgcgccagatctccaagctccttcaaggaagaaaccgatgcgccgatcccgatgctgagggtcaaagatacagtgtgaacggatgttttttctcggatttcatccaaaatcgaaaatttcgcgttttcaagctccgttaaaatgtgttcatttaacaccgcgataaaccgctccgaggacgtccgtttcaggaaaatgccatactcctgcgcccacgcatttaataatgaggtgacctggctgttcatcgtgcttctcgtttggtcgtccagcccctgtgtgacgtcatcatagttatctaagaagatatatgccagcacggttctctcattttcgtactgcttttcaatctgaatctgttctgtcacatcaaagaaataaagcaggcgctcatctcttttaatcactactttaaacttccgctcattcaaggtgatcgtttccgaatcgacctcctgcttgatcagcggcacgacggcctcgcatgtgtcatacagcgagcgtccgacgagcgtgctttcattaaaacaggaagacaaaaacggattcgcccactcaatgtaatattgatcattaaacagcataatcccgataggcatttccattaatgcctcttcgcctacttttttcaatctatacgataacgtggagatataatcgtcaatttcttttctgatcagagaatccgcacgcttaatgaaaaacaagatcacggcgagcagcacaacgccgatggctcctatcagccagttaaagtaaatgctgatgagaattatgatgattgacaatgcaatcaatgcatagatgggataccgaaacaacggtttttcataaaaactaggcatttctatcaactccccacctgtaagtcacactcaatttcgcgtcaccttatttcttatgttaaagcctatgtcaatgatgcctaagaggagatacacggacaagatgagcggaaaaagcacccccagcacaattgctaatacaggaacggctttcggcatctccatttcgcggcaatagaaaaaaataaacgctaatccttgaatacaaatcagcaagctgagaataaatcccccattcaatgaaaccgaatacagcatatgccctttttctaaaggcagaaaccctaatatcgtcacaataaaatacagaatgacaacgctttgcgggagtttgagctctctaaaaggcttcatcttcggaagatcaggggaaaatcgccgtaaaagcggccttgccatagcataactgaggaaagaaaaaacgatgccggtcaatacgagcactgtcggaaaaagatattgaaccgtgctcagctgactttccatcagcttgatctgcttcccgaactggtctccgtaaccgagctgttttgacatggtatcagccacagacagcgactcccgaagctgggacatggtggtatcaaccacattcatattaagaaacacgatgctgaccacaaaaaaaacgacgccgcacagcacatacgccatagcgccggcagcaaccgcatagccgggctgtttctttttaaaataatatcccatggcgattcccgtacaggccgccgtaaaagcgcctgtaagcccggtaaacgaacttacaataaagctgacaggaaggctggcaagccccatccataccccgggcttcagaccgtgccgaatggtgtaaagaatgatcggcagcggcaaagcaaagagaagaattgcccccagtaaagggaggtacacgaccaaaagggaaatgattgcaaaaatactgatcaaaatggcgccttctattagagcccttgtatttttcacttactcacctcaaaccttgtatcattcgaacatacgaatagaaaagagcagcttagacgactgctcttttgacgccgcaatgtctctttcaagacctgaattttccataaactctccaaaatacacgtatatattttaacataagtcgaaatcgcaagtaaaatgagcgcggacagccgcaatgttccatgtgaaacatgaaaacagacaaacggacatcctagtgaaagaatgcccgttgtatcagtgatcctgatcatccatgaaaccagaagtatctctgtttttctttttggtttttcgtacatataacaagacgataacgataagtaagagagtggtcgcctgcaaaaccccgctgctgaaaaggaagaagttctttatcatgtcccacatatagtttcacctctatttcgtatttcctttacattgagtttccctttctggaaacttcaaaacatgaggaacaacatcgggaccggggcatatgctgaaagtgaaaatgaaggataaaggagattcttacaccatgactgagcggagaacattagcatggcatgaaacgttagaactgcatgagttagtagctttccaggcaaacggacttgtgaaattaaaaagaacagagcgggacgtaagcgatgccagattaaaacagctttacagattttccatccattcgctggaacaaaatctgcgtgaactgcttcctttcttccctgaagctcccgcttttcgtgaggatgaaacagaagagcgcgctgattcctccttttacagcggcggcctgctcattctggccaaaacatctgtccgcaattatgccggagccattacagagacggccacacctcaattaagacacgtcttcgtcaagcacttaaacgcggccatcaagtggcaccaaatggtctttgagtatatggaagaacggggtcaatatccggcttacaacctgagcgaattgctgaaaaatgatgtacgcaatgccagaaaagccatcgcgatgaaataaaaaaaagcagcaaggaatttaatcctttgctgcttcttatttttgagcggactgatcttgaggagacgttttttcccggtatgcctcgagaaactcccggttggcatctccccatttcttcatttgcaaaacgatcggttccagcgacctgccgaattcggtaagagaatactccacctttggaggcacctgctgatatacctcccgatgcacgatgccgtccgcctcaagctcgcgaagctgaagcgtcagcatacgctgcgtaatgctggggcaaatgcgccgaaactcattaaaccgcttttttccgccgatcatatgataaaacaaaatacccttccactttccgccgataacggaaagcgtcagttcaaccggacaaccttctttattcggatatatgttcatttttcatcctccatagtaccttttttgatactatatgctgattagcatctgacttacccagtattttactcgcaaccctccccacctctcaacaaaaatgcttctttttcacatcaatttttaaggttttgaagattacaccctcctcaagacgtgttaaactataaaaagattgtttacactacaaaaaaggacaaggagttattatggaaaaaattcttattttcggacatcaaaacccagacacagataccatttgctctgccattgcctacgctgatctaaaaaataaactcggcttcaatgctgagcccgtccgcctcggacaagtcaacggcgaaacacaatacgcgcttgattatttcaagcaggaaagcccgcgtttggtggaaacagccgcaaacgaagtaaacggcgtcatccttgttgaccacaatgaacgccagcaaagcatcaaggatatcgaagacgttcaggttcttgaagttatcgaccaccaccgtatcgccaacttcgaaacagcggaacctctttactaccgtgctgagccggtcggctgtacggctacgatcttaaacaaaatgtacaaagaaaataacgtgaaaatcgagaaagaaattgcgggcctcatgctgtcagcaatcatttccgactctctgttatttaaatctccgacttgcacggagcaagatatcgcagcggcaaaagagcttgctgaaattgccggcgtagatgcggaagagtacggcttaaacatgctgaaagcgggcgccgacttaagcaaaaaaactgtggaagaactgatttctcttgatgcgaaagagttcacgctcggcagcaaaaaagtcgaaatcgcccaagtcaacacagttgatattgaagatgttaaaaagcgtcagccggaattagaagcggctctttcaaaagtaattgctgagaagaaccttgacctgttccttctcgtgattacggatattctggaaaacgattcccttgcgcttgccatcggtgatcaagcgtcaaaagtggaaaaagcattcaacgtgactttagaaaacaacacggctcttttaaaaggcgtcgtatccagaaagaaacaagtcgttcctgttttaacagacgcgattgcagaataaccaaaacaccccggaaacccgccggggtgtttttttttacagctcattcctcagacggccgttttgtaagagctttctccgaaaatctttttgacggaatttaatatacaatatataatatatcacatgtaaggagttcgttttcctaattattgtaagttaatatcagaacatcagaatcgggggtgtctatcctggaaaaacacgctgctctttcttattcacgaacaacaggcatttggcttgtgctgacaggagctatcttatggggggtctcgggaacggttgcccagtatctgttccagcaccgccattttaatacagaatggctgacttcggtgcgccttctggtgtcaggggcgcttctgctcggcatcgcgtaccgcaaagaaaaaggacggatatgggctgtctggaaagacagacgggacagaattccccttcttttattcgggattttcggaatgttaggcgttcaatacacctacttcgcggcaattgagtacggcaacgcagccgctgctaccgttcttcagtatttagggccagcgatcattacatgctttttagcgattcgcgcaaagagaattccttcagcaaaagagctcctcgccgtcttattggcggttgccggcacattcattttggtcacgcacgggaatgtcggaagcctgtccatatccggtctggccgtcttttggggcatcagttcggcgtttgcactggcgttttacacccttcagccgcatcgtctgctgaagaaatggggatcggccattattgtcggatggggcatgctgatcggcggagccgccctcagcttgatccgcccgccctggacatttgaaggcgagtggtcctttcctgcatatgccgcgatcgtgtttatcatcattttcggaacgctcatcgctttttattgctacttggaaagcctgaaatatctgagtgcctctgaaaccagcctgctcgcctgtgcagagccgctgtcggcagcttttttagctgtgatctggctgcatgttcccttcggaatatcagaatggctgggtactttgctgattttagccaccatcgctttattatctatcaagcaaaaataacctctcttttttagagaggttttttcctaggcccagagcaccacttagtctcaattacccatatattaaaaggccttttttcattttactatcatccaaaagaggaaaatagaccagttgtcaatagaatcagagtctaatagaatgatgtcgacaagtaaatcatgcaggattgttactgataaagcaggcaagacctaaaatgtgttaagggcaaagtgtattctttggcgtcaccccatacatattttaggtctttttttctgtaacaaacctgccatccatgaatgcaggaggatcgaatcggcagatcgcaaaaaaaggtacatacaaaaggagacatgaacatgaacatcaaaaaatttgcaaaacgagccacagttctaacttttacgactgcacttctggcagggggagcgactcaagccttcgcgaaagaaaatacccaaaaaccttacaaagaaacgtacggcgtctctcacatcacacgccatgatatgctgcagatccctaaacagcagcaaagtgaaaaataccaagtgcctcaattcgaccaatcaacaattaaaaatatcgagtccgcaaaaggactggatgtgtgggacagctggccgctccaaaacgctgacggaacagtagctgaatacaacggctatcacgtcgtgtttgctcttgccggaagcccgaaagacgctgatgacacatccatctacatgttttatcaaaaagtcggcgacaactcgatcgacagctggaaaaacgcgggccgtgtctttaaagacagcgataagttcgacgccaacgatgaaatcctgaaagaacagacacaagaatggtccggttctgcaacctttacatctgacggaaaaatccgtttattctacactgacttttccggtaaacattacggcaaacaaagcctgacaacggcgcaggtaaatgtgtcaaaatctgatgacacgctcaagatcaacggagtggaagatcataaaacgatttttgacggtgacggaaaaacatatcaaaacgttcagcagtttatcgatgaagggaactatacatccggcgacaaccatacgctgagagaccctcactacgttgaagacaaaggccataaataccttgtattcgaagccaacacgggaacagataacggataccaaggcgaagaatctttatttaacaaagcgtactacggcggcagcacaaacttcttccgtaaagaaagtcagaagcttcagcaaagtgctaaaaaacgcgatgctgaattagcgaacggcgccctcggcatcgtagaattaaacaatgactacacattgaaaaaagtcatgaagccgttgatcacttcaaacacggtaactgatgaaatcgagcgcgcgaatgttttcaaaatgaacggcaaatggtacctgttcactgattcacgcggttcaaaaatgacgatcgacggtattaactccaacgatatctacatgcttggttatgtatcaaactctttaacaggtccttacaagccgctgaacaaaactggtcttgtactgcaaatgggtcttgatcctaacgatgtaacgttcacttactctcacttcgcagtgccgcaagccaaaggcaacaatgtcgtgatcacaagctacatgacaaacagaggcttctttgaggataaaaaggcaacatttgcgccaagcttcttaatgaacatcaaaggcaagaaaacatccgttgttaaaaacagcatccttgaacaaggacagcttacggttaacaactaataacaacaaaaagaaaatgccgatacttcattggcattttcttttatttctcaacaagatggtgaattcaatcatggcacgaaaatggcccgttgtaatattgatctttttgggtgcgttcctgtttgtcggcttactgccgaacaaaaaccacaattcctctgacacaaacacggagcataagaaagattaccgggcggcgtatcattttacgaccccggacaaatggaaaaacgaccctcaaaagcccatttttttcgaggggaaatatcattactactatctttataatcgggattacccgaacggcaacggcacagaatggcggcacgccgtatcagaggacttggtgcactggacggacgaaggcacggctattccgaaatacaccaacgaaaacggcgatatatggtccggttctgtcgtcattgataaacacaacaccgcgggcttcggcaaaaacgcgctggtcgccgtcacaacgcagccgacagccaaaacaaaagcccaggaacaatatttatggtacagcacggacaaaggaaaaacgtttacttcctatagtgatcagcccgtgatgaaaaatccgggaactaaggatttccgggacccgaaagtgatctgggatgaacaggatgacaaatgggtgatggccatggccgaaggcgaaaaaatcggtttttatgaatcactcgatttaaaaaattggacatacacgggcggttttatcactcagcagatcggcctcatcgaatgccccgacctttatatgatgcgtgcagatgacggaacacccaagtgggttctgggcgcaagcgcaaacggcaaacccgcaggcaaaccgaatacgtacgcgtattggaccggaaactttgacgggaaggaattttccgccgatcaagaagaaccgcaatggctcgattacggctttgactggtacggcggcgtcacatttgaggacggtaatagcgaagatccgctgacaaaacgctatgcgctggcatggatgaacaattgggattatccgaatgaaacaccgacactaaaaaacggctttaacggcacggattctatcgtccgtgaaatccgccttcagcagcaggacggcggcacatacagccttgtgtcagagccggttgaagcattgaaccaattaacctcttcaactgacagcatagaacacaaacaggtgaacggttcagagacactgccgatcaaaggtgatacatatcagcttgatatggatatcgcttggtcagatatcaaaaatgcaggcgtcagactcagagaatcagcagaccaaagtcggcatattgatgtcggtatttcggcagaagacggctatgcctatgtgaacagatcgtttacagaccagcctgataaaaccggtgcatacgccgaaagcaaagccccatttgacggaaacaaagggcgcgtccatctgaaaattctcgtggataaaacaagtattgaagtatttgcagacgacggaaaaaccgttttgacaaatgaagtgttcccaaaacacgaagatcagggaatcacgctcttttctgaaggcggctccgctgactttcagcatattgagatgaagcatctcggttcgattcattcttagacgtccctcttcatttctaaccagcgcccggactgtggtaaaatgcaaatatgtatactacgattcatgaggtgttccattggataatcaaaacaaagaacctgtgctgaaaagaaccatcatgcgggacgaagtgtatcgcacactcagaaactggatcataacgggcaagctcaaaccggaaacaaagttaaaggacaaggatttgtcggaaacattgggaatcagccgcaccccgatacgggaagccttattgcggctggaagatgccggcttggtgataacaaaagcgaacagatggacgcttgtcgctccgattgagttaaaagaagcggaaaacttgtattccatcgtctggacgcttgaaaaactcgcattgcagcaagctctcccgcatgtggacgatgccgtgattcaggaattgaaacagctgaatgaaaatcttcttcaaacaatgaaagacggcgataaactggctatcctggaagcggacaatgcatttcaccatcgcatcattctgcttgcggacaatgccgaacttcacaaattgcttgtaagcctgaaagtcaaaattcagagaatggaaatccgctatttcagtgaaaacggcgctttaaacagatcatataatgagcactctgatatcattcacgcattagaacagcaagataccgccgctgcttttacagcgcttgaagcgaattggaaaaacagtttagaacggttgcagaacatggcatagcaaacgaaaaagccaaatcactcatatgatttggcttttttacggatatcacaagacagccgcgttggctgtcttgtttactttttgtttatatataaatacataccgtaatccgtcggcacagaagcataccccatctgtctgagcatggctgttatattcccgcgatgatacgttccgtggttcacaacatggaggatcatatcggccgctgcggttttcatgatgtcacctgacggatgctctatttcaagggggagactgatattttcttccttttgcaaaaataattgatatcggtctgataattccgagaacatatcttccagctcttctatctctttagacaagatgtcctctttttgctgttcagctgatttcagcgtatcctccagacgctctccggagaacacatcaaaccaccccttatccgacagatacacatgagtcaatacaccggctatcgacggaaagacactttgaatctccttacggtacacatcctccggaagctctttaagccgggtgaatatttgctgatttgcccaaagatgataatcatacaattgcagtgccagatgtcccacattaccctctcctctctcgatatagaacgtacgttcctaattatactacactacatgcggctttgtaccatcttcttcattcgcagctgagaaaatccgataaaagccgaaattaataagaggaggcctgcgccaatataaataaaccgcacgccgaatacatccgagataacccccgttccgataatggaaaacataaaaatgaactgaactaaagctgatctcgccgctaatatattgacccgtgtcttttcggtcgtgatgttttgaaggaatgtttcctgcgtgagatctcgtaatacacaagccggccccatgcacagcaccagaaaaagggcggtaacggcgcttgtgatcagcccgtaaataaacgtgaacattccatatgccaaggctcccgtcagcataagcggaatgagatgatgctgaaacttgccggataacttatagatgatcagtccgccgatcatcgtccctgcataatagactccgttgacatacccccaccaagcctctcctttatgaaggacgtcatgcacataagtcaaggacacagaaccgatccatatcatgcctgcccacgattcgatcacatccatcacaatgagaaccctgagctgtttttgctgaaataaatacacccagccgcttgccgcatctgcaaaaagggaacgttccctgactgctgccggcgcacacatgcgtacttgaagaaacagaatgatgcccaacaccgaagaaaccaataacatgacagtgacgatcattgtatcgctctctcccaggaacgctatgatgacgccgcccagagaccaccccgcaaactgaacggtctgatccgccgccgataataaaccgttcgctttcgcccttcgatcaggaggaatgatttccccaatcagcgcgctttttatcggagcaaaccatccgttgcaaaaagaaatgcctccgatcagacaaaacagcagaaaaaagaatgcggatgaaccggtttggatgacaaaaaacaaacagactaacagtgtgatctgtatcaattgagaactgattaacaaagaacgaagcgtgaaccggccggtgaccagcggcaaaacggcgctgcccaatacgcgacatacaatgctgacgaacgtcataagagaggccatcgccgtcgaaccggtttttgtaaacaaaaacaagatgacagccatcgtataaagtgagaaccccaagttgatagcggtctggctgtataaaatagcgtaatacgctctcttcatattcatcttctcactccctgattatgtaaatcataccatatttgctgatcagctctcttttttttaaaaaaggtaggtatggagtcaaaaaacagctggctgacatcgaaaatgtcattaagattccggacaaaaacaaaagccgatgcgcgcaggcatcggctttcaaattaacctatcatctcaagaacaagcgaaacaaaagcttcagcggccggaagctgccattttttctttttgaccagcatatgagaataaagccgctcgaacggctcagactgctgaagaattttcagcttccccgcttttacctcttcttttaccgtaatataaggtaaaacggagaaaccgagtccgctcatcaccgtctgcttaatggcctctatgctccacagttccattgtttgtaaatgactgatatcatgtttgacgagaaatcgttcaaacatagtccgatagctgcatccctcttcatttgtaataaaaaagtgcttgccgctttgttgatagtcgtcaaaatgttccggtgcgtcactgcccgccacgaggacgatgcgttcctccaataaagaatgatgtatgcatttttccatttgtatctccggatacaccataaatgcaatatccacacggccgcttactaattccacctgattctgcccgcatgttccgttgctcaatatgatattgacgttcggatacttcatggaatattctctgataatcggccccagtctggaaatggtcaaagactccggcgccgcaatttttaaaacgcccttcacctcgtgaatgctttgcatatttttgatcttgtcatgggcggaaagtaaatcctcggctaacggtatcagctctctccctaaaggtgtcagtttcagacgccttttttcgtacgtaaataatgcgccgccgacctcctgttcaagcgcctgaatatgggtcgtaatcgtcgactgcgtgtatcccagcttcgccgccgcccctgtatagcttcccttatctacaatggcctgaaatgtaataagatgtctgatctccatatgaattcacctctaagatgtatcgaaaaaatcaataatgcgattttatttttcaattttatttatacctattcttatcatacaataaaaaacggctccatcacattagcaaatgaaggtgatttaatgagtatcatagcttttctttcttatgtcctgatgacatctattacgcccgggccgagcaatattttaatgatgaatgaagcgcgcagagccggctttatcggttcatggcgttttaacggcggcatcctgacgggatttgcagtgctcggcattctcagcggtctgtttaccatgagtgtttatcattggattcccgtcgtggaaccttactttaaaattgccggagccgtctatttgctctatttggcttggcagatctcgctgcccaaaacatcaaaaggcgattctgaaaaaacccgatcgtcttttctatcgggatttctgtttcaaatgatcaatataaagagtattttattctttttaaccttaatgagcgcttttatattgccatttcagcacacgtatccattgattgcgttctggctcgcgtcggctattctcctgggctgggcggctttactgctgtggtcggcgttcggctctgtttttaaacatctctttgagaaacacgataaagcgtttcgcatcgtgatgtgtctgctgctcatctattctgcggtaagcatttatctgtaattcaaaaaagatccgcctaaggaatgattttcaaaacagaataaaaaaagagggcttcctttccggaagccctctttccgtctgctacgccaataaaagaaaaataagcgctaaaacagccggaagtccttgttttacgataattgatttgtttgaagtaaagcctccgaaaatggccgcgatgaccacgcagatgacgaaaaacatttgaatcatatggccaatcggatcagctccgaggatcagcccccaaatgaggccggcagccagaaatccattatacagaccctgatttgcaaacatgaccgctacattccgatcaccttctaaatgcttcggcaatttgaaggaccgcttagctgccttcgaattgataaaaaacatttcaagtatcatgataaatacatgttctaaagctacaactccgacgaaaacagctgcaataatctccactgtccctctcccctcagcttcacttcaaccttatttccattgtgcgattgtttcgataggaagacggtaggaagcatatccttcgtctgccgcttttccgattgatagcagcatgaccggtacataacgctctttatccattccgaaaacctcggcaatcttttctttatcgtagccgccgatcgggtttgtgtcatagccgtgcgcgcgtgccgtaagcatcagctgcatggaaacgagtcctccgtcaatcagaatcgtttcacggttcacttgctccggcagtttttcaaaatgcgccgtcaacgcagcgatttgtctgtcttttacttcctgcggcatgtagcccagttcgaccgcttttgaataaatttcttctaaatagtcatcactgttcatatctgcgaaaaccgcgatcaccgcagatgatgtgctgacttgtgtttggttaaagctggcaagcggcgcgagtttttcttttccttcagggctgtcaatgacgagaaaacgccacggctgcgcgttgactgaagacggcgctgtcgttgcttcttccaggatttgagtcatttcttctttgctgattttcacagccggatcgtaattccgaatggaacggcggcctttcataatgtccataaaatcgtttgttttcagttctgttttcatgtgtaaaacactcctatgctttcatattttctatattattctgcatctgcgacaatacgttttttaacatactgcgttcttcctcgctgacaccggcaagcatttcctttatgaaacgctccttctcctttttggaagcctcaattctctcccgcccctgttcagtaagccggacaagtataattcggttgtcctcgggcttccgccttcttgtgaccatttctttggcttcaagctgtttcaagtgtcttgtcacggctgcgccatcaatattcacctttttctgaagatcgctttggctgatctcatcgacgtaaaaaagcacggcgagaagctcaaggcgggattggctgattccggtgcacgcttcaaacttggtgccgatcactttatgcagtgattggagctgatataaaatctcgccttcctctgaacaacatgctgtcaaaacccatccccactttcttttgcgcaattaattgactagtcaatgtttgatatatcaataatatacagccgtcattctatttttgcaagttttttctccttttttaaaaaaagctgccgattaacggcagctcgcttcttaatgattatggacttttctgaaattactgccttttacttctgcgacatcatataccgtcacaaaggcttgtttatcaatgtcattaataatttctttcagtttggtttcttctaaacggttgatgacacatgtgatttctttgaatttttcatgggaaaaaccgccgtatgcttctttataagtggcactccggcctaattcctcacgaatggtctctaccattaatgcaggctcattggtgataatctgaaatgttttagaaccgcttaaaccttcctcaaccacatgaatgaccttagacgcaatgtagtaagcaatgacggaaagcaatgcgccttgcagcccgaatacaaaagaaacaaaaataaacacaaacatgtttaaaaataaaatgaggtcgctcgtgccaaacggcaatttccgtgacagaagcacagccagcatatcaattccgtctaatgcgccgccgttgcgcaatgccaatcccattccaaagccgataataatcccgccgacaacggtgattaacagggtgtctccctcgatgatagcaggagtgtgatggaaaaaactcgtgcctgcggcaagtgagataatgccgataatggatagaaacgcaaaacctttcccgatttgcttatatcccaaccagacaaacggtatattgatcaccgcaattaagatcccaagaggcaaatgaaacagctgtgaacagacaatgctgagtccggttacaccgccgtcagatacactattcggaatcaatacggtttccagtccatacgcggcaataattccgccgatgatgaccatgatggcccgtacgattgatttcgctctgattttcttacgtctttgtttttcgattgtactcatatcattccccgcttcaattattttttcttatttaaatataccataattgatacttttcgttaaaaataagcctatcggctatgttgaagcaggaaccgaggaaggagatgtcacagataacgtatccatttatgactttaatcattcacaacgcaatcattcaccaaaaggaattaatgaccattaataatctcttttattccccttcttcacaaattcccaatcatgttctatattttttctcacccgctgaagaaggctgaaaatggtttctttttcctcagatgtaaagccggacagggctacctccgcagaatgctctccttctctttgcaataacggataaacctttctccctttttcagtcggaaacagtttttttatttttttattttgatcatcaggtcgcttttcaataaacccttgtatttccaattttttgattgctctcgccgctgttgttcggtcaactttaatcatttccgccactttttcctgtatcactcccgggttttcacatatccgcacaagatagagatactgcccttttgttaagtctaattccttaaattcaatattgctgatggaatccagtgcccgtgcgatcatgccgatttcccgcaaaatatcagtcatatcttttcaaacccttcattttttgttgcatttgcaatataattattttatcgttacttctataagaccacaagcaagccgtgcagtccagactaacatgtgaaaaggattggttgattatgatgataaaaagaataacaacggaaattgatttgcaagcagcgcttgagattagaaaagcagtattcattgaggaacagcaagtacctgaatccgatgaatttgatcagttcgatacgcttgaggatcagtgcgggcatgtcttggtttatcatgaaaatcagcctgccggcacaggacgcgtccgcattgtaaaccatacaggcaagctcgaacgaatctgcatcctgaagccttaccgtaaatacgggttgggcaaagtaatcataagcgaattagaaaacatggtaaaagaaaaaggcatcacccaatgtaaactgcatggacaaacacatgcggaaggcttttatcacaaactgggctatcagacagattcaccggaatttatggaagacggcatcccgcatgtcttgatgacaaaagagctgtgagctgtcactgaatgagcagccaaacggctgtatgaattatttaccgaaagccttgtataaaggctttttttcatattctgaaactcacaactcaaaggtatgtgtgctcagccggtgcttgcacaaatgaccgccacaaaaaaatcaaagctggaataaaattactaatttaagcttttaatctattaaaaattaacagttaaagagattataaaaagggaagaaaatctcaaattatacataaaaggctgattctctctaatgtggactgctgacgcgttacattttttctatcttcacatatctttaatactacgtacgttataaatagattccaggaggagatatgaagtggaagaaacgagtatggagccatcacggctctgcaaagaatttgctagaattctcaattcaacgcccagtgtcgtaaatggcgtatgtacggcgacaagatttcgaagcaacattcatccggtggtactcggaagaagagccgaggcatttccttttattcctcaggccttttcatttgaaagcatggatcgggaaggcagagctttatgtttaggtgagactgttttactgcaagaagaagtgaacccgttaatgagtgagctgcgcaaattcggtatcatcgtaactgccgttcataaccattggctgtttgataaaccgcgtctgatgtttatgcattttgaatcaattgataaacccctcaattttgcaagaaaagtgagagaggccctgagagttctaactactaaaactgtgcgtgcggtaccaaaaactgacggggagctgattgaacggcatggtctttgtgacgagttcaacgatattctaggcggaaccatgcatacgtttgaaaatggaatttgtacagtaatgagatcacgaacgaatataaaaccagtagtactgggacggcccggaagatcattcttgctcattccgcaaatgttttcatttgaatcaatgacaaaagacggccgtgctctctgcagcggagaaactgtcattctgcaaaaagaaatcaatccatttatcagcgttcttcggaaacatgatctgattgtaacgtcacttcacaatcactggctgtttgataaaccgagactgatgtatattcatttcgaagcgattgataaacctgtcaacttcgccttaaaagtgagagatgctttaaaagtgcttactcataaagaggtcaaagcttagcatgttttgaagaatcaaaaagcgattaaaataatcgcttttacatatgatcaaccgaaaacaaaaaagagaccatatataggcctggcacgacattttttatgataagcgagactattaaaaaacagccttataggctgtcgttttgtgtatattctattgatgagtttatactaattcatcccgcattccatacaagctctttatttctcaatggttttctacatgtcgttgtgcaaacaccttcttagccactgaaagagcattaagtacacgcgggaatcctgtataaggaaccaattgggtgatactctctacaatctcagtcggtgttaatccggatgtaagccctgtattgatatgaagttcaagctgcggctcggttccttgcgttacaagggatgaaatggtaacaagcgcacgttgttgattggttaatcccggtcgtgaatatatatctccataagcaaattctatcatgtacttacttacatctggggcgatatctttcaagtcttcagaaatctttaaatgcgtagagattttatcatcgcttgttaaagtgtactccattaatttgtctaaaccttgttggtaacggctttgatccatttgaatttcctcctgaaaggtacttattttctgacataagataatatatcgcagccctctctaaccgtaaaatacataaaaactataaaaaccattcatttttttcatgagttatcttgatctgcgtaattactcttacaaaaaaatgaaatataccggataaattcgcgtactgcgtgtgaaacatatttacctttttttaaaataatcgccactttccaaggaattgatggattgacaatggaaattgccttaactaaactttgatcagtctttttcactatagactgagggaaaatggaaatacctagttcttctccaatcatttcgctgataaaatcccattgagaactttcataaacgatatttggacgaaaaccggctctaatacactcttgaataatccgatcgtgaagagagaagtcttcactaaacaggatgaaaggttcatttttcaagtcttgcatttccacaatctctttatgaacaagcgggtgagcggaatgaacgaagagcatcagttcttcattaagcaatggaatgatatcaaactgctcttcgtccactggttcaataaccacgccaagatccagtaccccatcttcaacctcctgtttcaccttgtttcccccatgttctatcagcttgatgttcacatcaggatacaattgtttaaatcctttaatgattttaggaaaaaacaagacaccgataagcggcggtattccaattttcacttttcctttttttaaatgtaaaagatcgtataagttcgtcgacaagtcatctattgacttcataatcatttggccttgctcaaatacaatttcgcctgcatctgtcaaagcgatttgtctagctgaacgatcaatgagctcaacctttaattcctcttccaaacttttcaccatcttacttaaggcaggctgtgacaaatgcaaattttctgatgccttagtaaaactgttggatttagcaacttcaagaaagtaagtgatttggcgtatatccatcgtatgatctccattccataagtttaacgaatacattatattacttttattcattttacttatacaactgctgggtgtaaacttttaggagaccaaaatgaatcctggaggggttactatgagtaaattattggaaagtaaagttgctcttgttacaggcgcggcgagtggaattggtttagaaattgcacgtgaattcgctaaagaaggcgcaaaagttgtgatttccgatttgaacgaaaaagccgtgcaacatgcagctgaggaacttacggaacaaggatacgaagtcctctctgcggtttgtgatgtaacaaacgaagaacaagtagaaaaaagtgtctctaagacacttgaaacctttggacgattggatattctggtaaacaatgcggggattcagcatgtgtcggatatagaaaacttcccgactgataagtttgaatttatgctgaaattaatgcttactgctccttttagtgcgacaaaaagagtattccctttgatgaaaaaacaaaaatttggccgcatcatcaatatggcctccataaatggtttaattggttttgcagggaaagcggcttattgcagcgctaaacacggtttgatcggtttaactaaagtatcagcattggaaggagcggaatacggaattaccgtcaacgccatgtgcccgggatatatcgacactccattggtgcaaaaccagttaaacgatattgcagagactagaggcatttctaaagaaaaggtgtttgaagaagtcatttaccccttggttcctcaaaaacgtttgttagccgtgcaagaaatcgctgattacgcagtattcctcgccagtgacaaagcgaaaggcgttacagggcaggcagtcgtaatggatggcggttatacggcccaatgatctgaatttcatctgcaggagtcatagcgctttggattaaatgatttactcttcaagaaccaagccgctgttcttctaggagagacatagccatacagattgaagtttgaataaaaacaaggagagcagtaattaacattttttgacattcggcatcttaacttaagaaaagccgctttgttggcggcttttttactggttttcatgaggggggaaagaagcatttgaaaaagcgaaacgcgaaaacaagccgattcttgtcattgatagcatgtcttttatatatttatctgcttgccaattccttaatcatcaaacccaattcataaattcccttttgaaggtcttcaagagatgcataagcatatgataagcgaatataattccctttttcttgagcatagatactgccgagattgagaagtatcccttttgtcaaagcttttgtataaagtaatttcatagatagtgaaggcaatatttttacccagacaaagaatcctcccttcggcatattccatgcagcgacattcttcaaattggtttctaagagactcatgaccaattgccttctcacctttaattgacttctcacctgttctagatgctgctggtattcaccggatgtaaaccactctgccgctactctctgagataacgaactggagccgtaatctgtttgcatttttatgtcggataaacgttcaatcactggttccggaccgacgatccatccaattctcaaacccggacttaacgttttcgataaactgcctatgtaaagcacatgcccatttttatctattgttttaataggatctggaggaatctcatctatccataactcccgataaatgtcatcttcaataatgggaagctgtgcattctcacttgccgcaaggatttcttcccgtctcttttttgacattaaaatacctgtcggattatgaaaacaaggatttgtatataagatagccctcccccgttccccccttgccatgtggatgtgttccggcaaaagcccatcgttatccataggaactccagtcagcttcataccggctgattgaaatacgtgtaatgaataaagataggacggctggtcaagataaacggtcgatcccctttgcaaaagccccattgatatcagctgcaaggcttgcagtgcgcccgaaacaataagaatggaagaaggagaagcttgaatcccgattgttcttaaatagccgcttaatgcctctctcaaaggcaaatagccttttggttcctcatacccgaatgcctctatgttttgagatacctttcccatgatctctttcataacagctaaaggaaaaatctcatgtgaaagttctcctttactgagctgtataagatcagaattcgattctgatttattgatctcttgaacgattttttggcttggctgctggattccggaggttacatactgatcccaatcgggggcggaattcttagccaaaagtgtccatgtattgttcgtaacaactgtccctttgcccattctgccttcgattaatccatccgccgtcaattcctctaaagctgtaatgactgtgctcctgttcacctcaaattgtttagcaagcgtgcgctggcttggaatcttacttccaatcggccattctccatttcctattttctcttttataaattgaatgatttgtatgtacttaggaagctttttcatctttttttcttctggagcgctcataaaaaggatcctccttaaagtggttgggtcaaaatctatttaactggttgaagtcatatcatcaaatctttattaatatagaaacacattaaataactggttggtttttgtaaagaggagtgagaaagatgagaaagaaaacagttcgaatcggcatagcttacattctgatgattgggttgtgggcatcagctttcccgggaattcgcgcgggtttggagagttacacgccggaacacctcgctttgtttcgcttgttgattgggtcaatggcattgttggtttttgctgttttgactcatatgcgtttacctgacatgaaggatatccctgctattttatcgttaggatttttaggttttgcactatatcacattttgctgaatatcggagaaaaaacagtcagcgcagggacagcaagcttactcgtgaccatgacacctattttttctgccatgttatctcgtctgttttttggtgaacattttgggctttataaatggattggctctatcataagtttattgggtgtgtcgatcatttcatttggggcaggaaactatacaaattcagtgaacggaattttgttaatcctgctggcagctttttcggagagtatttatttcgtttttcaagctcgctatataaaaaaatatggatttattccattcgttacattcactatttggggcgggacaatacctatgcttgtatttctgcctggcttaggggaagagtttttgaacgcttcaatgaactcaacattgtctatcgtttacttaggtttattaccaacggttgtgccttactttgcacttgcatatgtaacttcactcgtcggtgcttcagaagcaaccatttcactttatttaacacccgccgtagccctggccatttcttgggtgtggttaggtgaagtacccgcgtttattgcactgacaggcgggatggttacagtcgccggggtgtgtttcacctatctaacagtaaataaaatgataaagattttaaatccttattttttatctaaaaagcaataaggtggatgaagtttaaccctgaaaatagagtcataagcagttctcctttttaatgacttgggtttggttcacaaagttgagtgtatgaatttttttagaggattgtggtatgttaaacgtacaaatattaatagaaagcaggtgatcccatgccaaacaatagcaaacccaacagtttaatcacggagaagtccccctatctgctccaacacgcccacaaccccgtaaactggcatccttggggaaaagaagccttcgaaaaagcaaaacgcgaaaacaagccggttcttgtcagcatcggctattcgacgtgtcactggtgccacgtccactaaactaaccactcaaaatatgttatattatcaataaattacttataccttttttttctgaatatggagtgattaaacggtggaactgcaaaacagaattcaacgtgtggctatctatctcaggaaatctcgtaataaggaaggcgaagaaactgaagaaacattggggaaacacagaaaacgactaattgacatagcaattaaaaacaaatgggattacgaactatttcaagaggttggaaactctatgaatgaaaaccggcccgaataccagaagttattatcaaaactttctgaaggtattttcgatgcagtcctttctgtcaacctagctcgcgttacaagggacgatgctgagacaccaaaatttatgagccttctcagacaagaagatatcctcttcataacggacagtgaacgaatatacgacttagaagttcaagaagattggcaggccctgaagtttactggtttcgttaacaactgggaatatgaaaatatcaaagcacagctaagaaaaggaaaaaaagatagcgcaaaaatgggaagatggtcaaacggtattccaaattatgggctagtttacaaccgttttgatcgatctctcgaaattgaccaacaaaaagccaacgctgtaaaacttgcttttcaacttgtcatagatggtttaggcgtggataaagtcgctaaagaattgaacagactaggttataaaacgaatagaggacgctacttctcaggaaacgcaataaccagaatgatacgtgctgagatatataaaagcgtgataatatcaaatcgtgtgaagggacgaaatttacatgaaggaaaattgcgcccaaaagatcagtggataatcgctgaaaatgcggctcctccaattattgatgaagagacttggaatatggctaatgaggctttagatcaaagaaaacttctctctcctagaggtaaacaaaaaaaacatcctctatctaacttaatcaaatgtggtttatgcggcagaacacaaaccgtttctcgaagaagagatagaaatgacgcacttgccattcagccatgcaataaaacagaccctctagggggaaataaatgtaataatagaggaattaaacatgacactatgataagcctcgtaattgaagctatacatgaaaaacatcacgaaatctcatcagaattaataaaattcgaagaagaaacagaagctaatgatattaagtcaattaaaataaacaaaatacaagaacaaatcaacaagtcgaaaaaggctcttaacatcttacaaattcaattagaagaggaactcatcaatatctcatcctttaaggaaagaagaaaaatacgccaggtggaattaaacaaattggaaaaagaaatgactgatttgttggaggaaacgaaaaaagacgcattaaagtcaaaaaagtcctttgctaacaaattagatttctttctggaaaattggcatacaatcgatggagcagacttaaatcatgaacttatgtcattcataaataaaattatctggtatgccccaagagatagtgaattgcctccacaattaaaatttgagtggagaatgtaaccccacaaaaaaagtgagcagccccttaaaggaaagctcactttcatttaattatgtctcaactctatcggctacttgatacgctttggagcttgaagtttctgtaactttatttattcccgttaaactcaatcccagcattaccactagtgacaaggctatcaacttgcgtttcactaatcatctctcctttttggatttcatttttcgctaaaattacttgcctgtagtacttcgatgacctttccgcatctcccttttttctgaatacttccgcaacttcaaacccaaattcctcaatgtcaccatacatcttatgtgtactaaagaaacaaaatgaattatcaattagattataacacccatcagtcaggtaaattgccttcaacagatcaaattttgctttatattctgagttatccctttctttagcaacagaatatcccttttcataaaaataccctgcggactttaaatcgccccttctcgcttgaacatgagccaaattaaaaagggttttctcaatacacgcatgattttctttttcaaaataattgtaggcatcaattaaacactcataagccctctgaaaatctcctatctgattataaacaattcccatattcaacatggaagtatatacgtgaagctgtctatttatcttcctcgatatttctaatgtctctttaaatatttctaacgctccattataatctaaagaatcaatcaaatttccggcagttatatatttacaccttaatattcgatcttcataatttttatactttccataaatacgcatagctctcttaacgtaattcaatgaaaaatacgtttgcttcatatagtaataaatctcagccattttataatagaactccgcatgttcgatctcatcatcaacataattcagtgactgttcagctcttctataagagcttatagcagaaaccaattcctttcttttgaaatcgtacattcccataaagaaaaagaaataataatccaacatccctttaatctggccttgatgttcttggagtgcctcatacgcattttttaattcttgttcgtttttagattgaagatagctaatcatcatttcgtgtcggaagtctaatagctggtggtataagatcacatctgggttcttctccatccgccccattaattcctcaacttcattttttaacctaacagcctccatatcaagattattctttatcgctgtataccagtcatttagttttttcgtaacaatttcatatggaattttacctttgttcaagaaaacttgttgcaagcaaattcccccactcccataaagaattttgaaaatttacattaattgtattatggcagattgaacatttcttgacaaagttaaaatgcaaaaaggtacgaattgtctattgaagaaattattcttttcgtctttattgcggttattgtaagtcctttgtttcttgacaagaaatcagcgcataaaaaaagagcagacacaaagtccactcaacaatttaaacggttatgcgattttagtattatttctaaacagtcttgttatcaggataatgtgtgctaaaaatcttacgattttcgtcaagcgtgttattgctacaaagagaaactagaagtctattttatttgccttaaaaaggagtacagaacttatcttctgtaccccttcaaaatctaaataagaaatcaatcttgagataaataaatccaatttatatcgtcaaattctttgataacataatctgatcctataccacgtaaaattctattaaagaaaatgatgtcatcttcatcatcgtaatcatataaatccttttgaacatattctttaataataaaattcgttaaatttgtattattaacaaattcggaaaagtaagatcttatagaaattgaatcatcttcatttaatttttcatcattaacaattgaaatcttaaaaacatttaaaatcgcattaatatcttcttcatccatataacataatggttctaattttttgtcttcttctgtaaatggctttcgagtatcttcaattattacgtaagataaaatgttaccatctttcagcacacgaaaaacttctaaatcacgtaattttaaagctctattaagtgatagcataatttcctcctactcaaatattacccaaatactaaccttggactctttagtaattgacctattgttacacctactaaagctgctaatgttaccaaatatgaagggtgccacaatatatcagtccaactaaatttagaaactttttttcgttctttatctaattttttctgtttctctaacgcttttttaaaatcactagtcttctttacatttttttgtacagttttaggaacgccagctgaatttagagtcttattatgacttttccctccagttactctttcagctcctttaatctttcctttttcaacatgtacatgccaatcattattgaccccatcaacatgtggtccatcaacccgatatttccaaccaggagaacccggtacttgtttcatagtagcagctgaagcttcactagttccaagacacaaaaacatagttgtaaggaataaagtacatatcattgttaaaataaaactctttttcataaaaacctccaaatatataatattattgtagtacaaataatatataaatggagactttatgtatatattaaattgttaaaattaaggtaattttaatgaaaattaaggtaattttaataaatgagacgcttgacaatttcatttccttcaaaatccactatattcctatatatttcaacaaaatagatggtgcaagtaagtagtgctgtcatagaaagtgcagctgtactaaaaaatccctagaataagtcggtattcatttctaattggttatataatcttaatgccaacatgccaatgcgccatgacctcaaatgtctcctactatacttcaagatttaaagaatgatttctatgtaaattttacaacttggttacaacgttatcaagtcttatttaagcaatatttctcatactcccttgacaaaatttattaggagtagacattaagtctactccttagttttcgtttccttccctttaacttcttcataatcaggtgttttcttatacagaccaagtcggtcgccatcaccatcacccggcatatgtgccatttcctcaaaagaatctccaagcttctcataataagaataggtagtaagcttgcgagaactttcttctggctgataaaacgcaagttgaatatacttcccgtcatcatatacacgaattattgcgttatctctcttgtactcatcagaatcagctctcatttcttttctagcttttttctcctgcttaatcacttcattaattgcattatcatatttattaccgccgcacgcagtcagcagaagcacagcaaatatattaaggaaaataaaaaggttcttcaaaatatgcaccccctaatttttcaatattcattatactcaaaatatagatgtttttccacttttcatccatttccttttacctgtacatcatcgaccagccacttgtttttttctttcttcatctttgtttggacaatcagcacttgctgactggttactgaattcgcagtagttgatacctctacaatgttcaaaaacaattcagtcgaatcatcaatcggctttgaatagctttccagtgaacgtaatttgctttgtacactaatggaatgctttttatcagttcgagaggggaaggcataatcaaagcctttttctgtggtatattttttaaccgcctgatatcgcttatctatatcgctatagttcaagaacgctttaaaaaaagcatgattttcaacagctccccctgattccgactgacgtatttcttcttttttaaactctgctttctcctccaaaaacttttgtctcgcttcatcaaactcttgaaattttgagtaaagaaagtatcccattccacataccaaaagtaataacaccccataatgaagccaattcgcttttcttgtcatagaaacaacctcctaatttttaatgcgtccaaatgacactaaatgattgcgccagtatccggattttagatcagaatactgaataccgttgtcatttgaattgaacattcgaccttcaccaacataaatgccgacatgagtaattgcctttccttcatatgtgccgccaaaaaacacgaggtcacccggcacggcctgtttctcactgatcttttttgtcgctccgtgctgttcctgtgctgttcgtggaagagtaatgccagcttttgcatatgaccattgaacaagccccgaacagtcgaagccacttttcgggtttgaaccgccccacacatacggttgcccttcatatttcagagcttctttcataatgttttcatagccatctattgcgccatcaacaggcttcacatccttattagagcctttgagataacgcatcacatgatctacatagctcggatcaccgtagcttttccagcccatcttaatggcttgaagacgactaaaatctaaagccagtttttttgtgtatttgccgccgtgcttctttacatatccgataaatccagagccaaagttatacgattgtaaagctaaccggacatctcctccggcttctttaaacacttttttaaaatgtttgataccgacttcaatagagtattccgggtctgtgatggtatttggcggcaatcctatgctttctgaactttgcataatatctaaagagcgcccaccactttcctgcatggtgagcgccataatcacattcacttgatcatatacgccctcttggcgagcgtacttttcaaacgcaaaacgaaaacgttcaacttcctgggcaatgccaaccgtttcaaactctccatctccgcccccgatttcattgtttccaatgtcatgttctctcgaaatcaacatgacggcggccacccccaaaagaaagaagaggatgacaggcgttgaacatatgagtatccaaagctttgtttttgactttgtcttacttataactgtcatgtcctttcatcctctcttaatctatctatgccttttgctgatgatcgaccgacaatatcatgcaggggaagagtttccaccttattcacgacttttggactgttacgtttcagggtcacaggcttttcagtgacttttttcggaacttcccgattcacaaatcggctttcaccgctgggagaaacagattgttttttctccatagaaaaaccatctgttcggacttttgaaggtgtctcagatgttcttgtaactggttgattcggctgtttattctcctgcttaacagttgaatagggaacatgttgtgtttccttctgaacctcttgataagccggagaaatgttctctcgttgcacttgtgctaattgatgaccataaccctttgcccgatgctctctttcactaaattgttgttggtctgttcgttcttcttccgcaatcgtttcatgatgcagaggagctctttttatgttttcttcttcctgctgataaagatttccgttcgtctcaggagaagtagaatcgtgattctcaacaaattgcctttggtcagatcggtctttttcatccatcttttcttgaagcattggtgcacgcttataagcgccttcctgttcttctttcaaaacatcatccatcataggagctttaacaccttctcgccgccagtctcttgtagaagaattaagctgttgttttttctgtaattcactcggcgttaatctaggctgttcttttctcatgttttgcggctttctttcaagtgcctttctctcttgatcagaaggcctggatacagatgttttttcattttgttgcggcgtcctcgaaatagctcccttattatatcctgctaccatccccggactatttccacctgtcaattcctcagaggatggcgatgtttgatcttcgaatccgtcttttccttttctattgccaaacacctttccaatttgcccaattgccccagatagtctgcctgcacctttttttgcggcctcccaagaaggctgtacatattcctttctcatgttgtctatcatgttattatcgacagatacaacttttccagcggtcacaaattgaacaatcgaatctcttttcttaattgcaatccacattatagccgccaacacaaccgtatttaacaggtacatcccaaaaccgttaggagggatgagtgtatcaaccatgaaacagaggacatatacaaaaagtattaaaatgcccaacattgcttttaagagataaatgcttcccaaacgtcctaaagcaacaaagcccgacatagcaagttgcggcacataagcgataataaaagcgaacggaacaaaaaatacaatcgctaaggcgataatctgtaatagaaaactaaggaacgccaaagcaagaaaagggattcctattgctattgccgcaccaacagctataaacgattcccccaattgattaaacacatttcctgttgtcattgcgtcatttttatatttgtccgattcatatttctttatatattccattttttctttctgtccttcatcagacaatttataggacaacagcttatcaacacgacttaactcttctttgctgtctcctttctcattaattttagccgcacttgtttgatcataattcacaatgagatagggctttttcaaggcaatctcaaagtacacattacgcattacagcgaccgtaccttccatttccttacctttctctatttttgaagcatcagcataaatgccctcattttctactatcccaatcagcccgtttcctgctttcaacagcttcccttgtagctcaacagaaagggcattcaatcccttcatgtaataaccggagtttgctacccataagcccccaataactaatacaataataaaaagaatgctacgtctcatagcatcctttgcgctccctcttacaaaaaatagatacacaacataaccgcctacaaagatgaaaagcgcttccccaaaattcgttttcagcgatttatataccgtttttgatacattcgtgatactgtctgcaaatttatctatcggcttaaggttatacatgacatccatacctgcatcgaccacacgaacgatatttgcggcaaatgagaatgtcacatttgtcatcccgacaaatggtccttcaagaaatttatcagatgcttcattattcgcctgataccgggaaatcggaaatcgtttcgactctagttcaacgcctcctgacttttcgattttgggctgtgtggttgtatctccatccgccgcaatggtagacactgctgttatgatggtgagaaacagcaaaatgacagctgacactataagaatttttttctttttcatgtcgttcctcctaatccagccttgtcagtaaataaaactgataatttgcgttcgctaaatccctttcggtcagcaccttccattcaggaaaacgatcatacagtttaaaacaaattgctttttgatacctcatgtgcctgaatatttttcgattatgctccactctaattcctagcagcgcttgcataaatagagccgttgacctatgcccgataaaacttttatagcgccaaccgtaacaccctagtacatcatgaacttcctgtatcgtgattttgtcagccttataacagcccgggctggtcagaaccaaagaatttaagagcgcaacctccatttttccaccccctttataaatatttttcctcggcgtaggcgacagcttttttctcaactgttttcaatgcaccttcccattcttcaaagaggcattcaattgatattttggcagtacggccataataatctttaaagagacattgcccttggaacatagattccatcatttttagattctcttttgtgacctccatgttcatccatttcaacacgtcttcacgttcgttcggttcatcaaaagcgaaagcaacaccaaagttgccgttgtcctcttctttcaaagcgtcttttgtagactgtgagataaaatactcagcgttattataagagcgacctatacgccgcatctgacgttcgacttttttcccttgctgggaagtggtgaatatccacgcttcatctataaactcaactgtctgttcatcttgattcattccaaacagctcacagaatttaccgagcgcaaacataaccgcacttgattttaattgtgtggttgtataattctcaaatcgctccgagtgctccggcaaatccatattttccacttctaaaatcgtgattctctcttcaagtgatagagccggatttgatccatcatgaatacataattttaggatggagtccgccacaacttcttttaaataatcgcctgcttttctcacggcttcttccggatgattctgcatttccttcacgatatggagggagccaacttgttcccctttttgtttcatctcaataacatttgatgtcgcacgtagaaacgccgtattcacatcgtcttttcctttaaagtcatagacttgctcaaagatgacttgaacgaggtctttcgctttcataggcgggaggaaggaaatcgggtctaatgcgccccagtttcctttatcctcatgatctaacgtaatatagttgtatttttctaaatgagcgatatacagagggaacttttctctgatctcttgatcgtttaaaactcggcgtatccatttcctcatttcttttttcgggtcaatataaagcgccttaacgttcagcatgctgatataattaaaaatcaattttgcgaggtatgacttcccgttccctgtgtctcctgtaatcagacagtgaggtgaacgtgtcttcgacccttttaactgctgatttgctaagaatggatgaaacaagacaaaatcacgacttgatagaatggcgctttctaaatcggtgtgctctataaagcgatctacccaagcaagaaagaatcctatttttgaacctatatcagagttaacagcaaacaaaccttcagccagcccatcttgtgttgtcttttgaatccagtttttatccgttatatctaacttttcgccgggcagcatcttataaaacagtttcaattgatccgccacaggaagcctgcatgtgatgcctgccccttttaaatgacgcctaacaatcgtagcctttcgggtacagtcctttttatctttgccatgaaccacaatgacggccagccagttcatcaagtacacttcttctttttttatttcatcttgcagatgccgcaccatcgtggcactggtcacagttgaaacgtcactgcggtcacctgtgctatgctgttcacgctgttcctctttcaattgttgcttcttgatatttaaggctggtttagtgatagacttcgattctgtctgtgccttgatctgtacttctactggaaacggaagagcctgcgcttcataaaacaaatcactttcagacatgttgtgcaaaaattcatcaacgacaacaaaagaagtgaagccttcatcttgatcactatggagatgtaatacagaaggatttgtagggtcaataagtgtattcgtgattgatctgacgtttctaatctcgctttcatcttcgattcgatgctttaagccacgcacaaaatgataacgattcatgtacgtcatttcctgcttcgtcagccgttcgccccgaatggacgccattacattggctaatgtctcttcaacttcttcatacttataaaaaaaggaggtcggaacattttgttcccaccccaacattttgacgactgtatcagtcgccgtattgaacaatgacaatacattgtctttcatttcaacgctgatgttaacaaggctgtttttcaatttaatgccgaagataaaatcatacttggtaagccgccctaaacgttgttccaagagtcttactgtttcctcagtgtaataacgagccacatccaaagcatcttcggcaagatcagattctaaatcctcaaatcgtttttccaactcatattcacttggatacatcactaaatgaaagtcatcatatgaagtaatttcttcgaataagtgtttccatttttgtttgtaattctcgactttttctttattctgcattgggatggaactgctttttatgcggtaatacgcccatacgtctcccgttcttgtcaacaacaggttgttgtatatggctttcatcggtgttcttaatttcattcgattttcccaccacctctactaattttcggaactcaatttgcttttcattacttaaatccaccttgcggtcattacaaaacttcttttcaggaagcttaaccagaaaatagtattttgcaaagtcaaagaaatacagatagatgttttttccttccggtttaattttcgttacaagcatggttaacaataccggggtaccaaaaatcacgataaagaatgtattttcaaaagcgtgagggaaaatcatcctcacgccgtaccaaaaaccgaagcatagagccacaaaaataaagtagttgattgcaggtatcaactcaatagcaaacggcaatgaaaaattctcggtaagctgttgaatttttttcggctcccgcattgccttccgataattaaaaactagacgccccacaatatcactccttacaatttgttcatgagtgcgtcaacccagccggagaactgcgaccagtgacgaatagtccatgtaacagcacttccgagaacacaagccgccacaattccgcctattttcaatttcacgaagtgcttagcagccaaagccacgacaacaatcacaataaactgcgagacaatgtccaaaacccagcctttaaccccgctaagagtagggaggccagcccccataatcaaatggttgaataaatccattttgttttcccctttctaattgtgttttaattcattcacataaaattgaccgctgttctctgttaattcgagcgtaaagctttcattgacaggtatctcgttttctttttctttaaattggacagcacaaataacctcgaaaccttttttcgtcccgaagaccttagcgcttttcacttcaccgaatacaaggcttccttgaagcgcttccggctttttcatcatatacaccatttcctcttgtttttcagaagcatatttttcaaagaaagatgtaagaaatgactcaatcgcttcctttttatctcctgcatattcatccctcgtttcttccttctctgaagctgatacattgccctttaagtcgtatatctcagtgaagtatgggatagcagagacggcgaatgcatcgcctttattgactacaggaatatttaatagcacttgtttttcagctttttcattttctgtgactttctctttcactttcttttcctttttcccatcctttacttttttctcaacttctttttctaccggaaagagattcgtatatgtcactttgtactgaaaaagcttccctttatcaccttctttcacgttatacaagctgtaatcatttagctgacgatctcccttaaagccatccatatcgaagcgatcgccttcatcaaagcttgtttgtgtctgtttcaccatgtaactctcaagattcttttttctttcgtcgatggcgtcttgattgtttttcacgttgatatattcattgatgaagcctgacaagaaattttcagccgccgttgtagacatattctgtttttcgctatcagcaggcttactggattgattccttaaatcatttacagtagatcgagtgttaacagacaacaaaacagacaggagacaaaagagaagtaacgctcctacacacgtccacaacgtccctgcgaccaaccgggtacgatctcgcggtacttttatatttgttttctcaggccgacggacttgttttattttttggaaagcagccttaaaaaatgattcttcttttttctcgtttccattttccttttgaagcatcttttcacccctttaagctgtgcctttctcactttcaggctgttttatttttcgggatagccttaatatagaacgagcgattttttcataattaggctcatttacatccccaacaaggaactttacaggcttaccattaatacttttcaagacttccctcatcttaatacctcgctttctatttgccttgtactctcaaggaaagataaaaaggatgctacacgaagtaacaccctttttatggcttgattctctatatacacttttacacttgtcattcgtccatccggtagatacctcgttttataaaaggtgtatctgtactcagaaaaacctttgaccctttgaccttccacaaccaacatacaatctctgcttagactccttacaaaaaccaacgacgggatacctacgttaaaccccaagctcctgaattgatcgtcaacagcagacacacaaccacctcattttgaaaaggtatcatgcgacctcaaaatttcaaactcaacatcgacttcctctgtttcttcatcttcactttcaggaatgaaaaagacagcagacacaaaacgtttaaaatcatcctttaagggatactcagattcaagcaaaatcctttgacccttctcataataagggactaattcattcaatctttcaatgaattcctcagccaatttcaataaaccgatcttttctaactcactttctaaatatgcccgattgagaagattaaagctattcatctttattcctccttattgaaattatttaaatagatcgctgttattttctccttccttcattttttcgatctttaacactataagaccaggtgtcaatgactgacgcctatctaaaacaaggacttctatgactcgcttcgtacactcgcccttccattcatgaaggcacaaaacatctttggccttataaatattttcgctgactgtaacctcagcagcccctttagaaatagcttcaaactcttccggaagtatctttagatgatgcactatcatgacagcacacctttcttgtttaatatcttgggtttcactcaaacccaccaacgttagcccgttggatcgctaataatctatccccctattcccccgaatcatcgggggactccctcgccggtaggcaggaacaaacggttgtttgttcaatgccaagagggttttggtggcgctgaatatgtcaactccttatcctcacttcgttccggtaccgttgacacatacgtttaatcgcatcacctgtgtttaagagcgatagcaatctatttaaaacgctaaacgaccatgtccctcacttcagcaagaaacacatccagcatcttttcttgtttctctgacagctcggcttccataatcatgtccgagaggtcattacgtcccaagtgttggtcagcttccagcaccattttcatggtgggggaacatgagtttttcagccagttccttgttttttggtaaaagtctctttgcggcttcatgtacagttgaagtttacctacatcgccaataaattcagaccaaaaaaggctcgttttccaatgctcccgagtgacttcctcgtcagcatcaacgaaccttacataattattaatgatctgcatggcgactaatgttaagtctttcgttttcatcaaagcatcaattgcggcttgcgcccgttcactttttaagcgcaattcatagcgattccaatcacctaattcttctaacgggatattatatttttcagcttgttcataatttttctcataaaagcagaggtacgcttctgatttttttgaaccgaaataaattgtcgttccgcctgttacaccatccgataaatcgaatgagccattgaaatcagatttcctaaaccgtgaaatacattcgcccttttgggcttttttcaacaattccgggattgaaaagtatgtttttttatcgtcaattgccagatcaaggcgagtaaatgaaccgccattctgtatacagtcttgaaagaaatcaaaccatgttttcttccggcaatctaagaacgactcaaattgccgacagccttgacccgataactcgaccagaatacctctattatctccgggcggagagtaaaaaactttgatgaagtccagctcaaacgttccgacatatccgtaaaagccgtttggcttttctgtcatgaaatctttgttcaagtgaagaatgttctcgataatgtgatcaacatcatgcgttttgaaagtcacacgaatgtagtcaaccattgatgttaaaggcttttcagcgttttcttctttttcttttacgattactacccccctgttagcgtgggggggtttttgtagttcactcactcgcttcgctccttcgctcaccgctggccgtctggtcgcttacgctgccgcaggcgactgccgtcgcctgcgctccctcgactccaaccagcgattccttaatagatgacatgaaatcataccccttcggcacaatcggactgtaaaactctaaaaccgaacctgtgccgacattggcatatcctcgccctgtcacttttttattcacaaacgctttgtcaacatcaccaaacatcattccgtatcccgtgtcagacatcaagcctagtgacacacggaaactaaactgatctcgtatcccgtccgctagatattttgcatccgggcgctgtgcccctaaaacaagaaaataaccagcttgtcgccccaacataaccaattgtttcatgtatgataaagcatcattcctctctttcatgtccagcaaatccatgaacgccacgtattcatcaaagaagataaatacaggtttcaaccctaaataggcatagttttcacccgtcttgtaattgggcattttcttcatttcatccattcgctccatcatgccatcaaccgactttctcaaacacataaggatgccatttttctgcgaatagactcttttcggcagcacctcttccaagtcggctaaatcggcatttttcgggtctaagattttcacatctgcccccagccctacacacgcttttatgatcgttaacatgaaataagttttccctccgcctgtaccgccggagatcagcatatgcggcaacttatcaaacttccatgacacatgtttcatcaacggtaaaacaccatctttcgccactgcgtcatctattgaaattcgatttttcttcacatcataaagcagtttgaagcagacaaagccttcttccatttctttatccaccaggtcacaaaataagccgttctccaaatctttccccaagtctaggaagcgattctgaaaacggctcatgtccatggctatgcgaatataaatgtgattgtctttgactcgataatacattcttggaaagtaagtgattttttctttagcagccgtgtcattcgaaaacagctttttcacctgaacactttccttttcataaaacttattcgagaaaatcatcctcgcaattttttgcctgtggtaaagctttttatacgcatcattaaacagaaaataagctaggatgacagaacccgccgcggctaaaagagtgcacagcacacttttaataagcaacgggacattcaattcaaattgctttacgattttcataacatccaagtggagcaaatgatcttcccagaagaaaaacatagataataaaaaaacaggtacaaatatgattgcacctgtcattattacattgtttctcattctaggccggattcgaacccccctatacttccaaagcattgttctaagcctagagatgaagcaacactcctaacgtttggatttatcccttttctcactccataagcctattatgtcgataattagaaattgaccaccaaacatagcaaatatgcagattgacacaaaaacggtgatgaaaatatcaaaaggcaaccatcccactggcttacgataccaagcgaaaaacacaaagaatacagcccacaaaacaacacggataattattgaccgcatctttttcgttttaaatattcctagcgacttttttattttaaaaacctctctcaacttactgtaaatgattatattctcacttcatttacttcaaatccacaaaatgataaaatatgcatatttagtatgtgaaagggaacattatatgtttgataaactcataggactttatttcaaattttcggtatacttaactcatcttcttttatttagtattatcttagcttcatttcacccccaagttttcacacatttttttagtgcaattgtaaaattcgttccaataccaattattaactattttgcagaaaagaatataagccatgctgatgtattttatattttcaccgttatttcagctatttcagggatagcagtaatatggaattatttttttcctagaaattatattggaaagatgctcgtaggtggcatagacataaaaaattatccatcattccatatggcttctatccataataaaagttctgagttaactacactttctctactcagtattattttgtttgcacaaacaaatgatacatcattctctacatttaaaagcttagtattgagtttactaatgaatgctccatttgtttttcttttttgttgcattggtacagcaagagctatgcttgaatgcgtatttttaatcatgtctggttttggaactatcataaatgagaagaaggatcaacttgagaaatagcgtgccattttacaatatgaacacgctattctttttatttatttcttatcatttccactagctgtagccgcaggtttcacagaagagccgcctttaacaagaatatcttcaacttcgactgtccagtttacatttgcgaaatttccattcgctcttgctccggctgaaattttaggatttttcaattcaacatcttggaagaagtcatattcctttaattcaacgtaagacggtacagttacctcaatttgcccaccttgaacgcttgaacctaaattataaatacgtgactcaagggtatccgttcttttcccatccacataggcataacgctcacggttcagccccaagaatttcagctcaccaaaagtcattttttcgtcaggtacaataaagttaaagttcatttttttacatctccattcggttatttttattcggttatttaaatttcaattttatattcacagattcgctccggtactgtctccatcgtggcgcttgtcagtcgctaacggaaaattccctcatggcgacctagtaggctatttatagccatcaggctgattacagccatgccgcacgcttattctagcctgctacagcatttaaagtgattgctgttcatcactcaaatactcacgcatgacttttcatcaaaaatgccctataataaaattgttgaggttttattgcgggcgttcttgatggtaatcatcaaggcgctttctttgtctgtatgtaattttcaaagagcacaatcctttctaatggcttttttcgtacaattcatcattgtacaagacgaacactcggttatctttcttgcctgtcggttcaaccgaccatatgcaccaccaatgccatccttcaagctgttttgacacttccacattggctaaatcataagttggcgcttccactacataagattcagaaattacataatcagcaaaatgttcgaaattcttgtcagcttctaaggcttcaatatccataacaatcgttgcattcacttttactttcattgcattccccctttcaatttttccaacaataccgatagtggtatatgacttcacactatacgcttttgttgaagtgcagaaaggtcttttctgccgataccgtaatttttacaaatccggcgatatgaaacgccttttttaagcagtacctgaatattattcggtgaaagtggcttattcaaaagatgctttataataacttgatttagtgccagtttcattctcaccgaccaattaccctccatttgtctggctaatggtacagcatccttcataaatgaatttgtttgctccaaatccaaatgaatcacccaatctcttgaatgtttttataaaggtaagaactttcaaatttgctcttgataactcttcccttaagagttgtatacccctcttcttctaattctttatttaattcgcgaatgatctcataagcttttgctcttttcacattgagaatttcttgtacatcatccactgtatatactcctttcatttgaccatccttccttttaaagatcatcaactctttatgttgatttaattataacactccgattcggagatgtaaataaaaaatagaacaattcggagaatttttcatgaaatcatggatgagacaacaaaatggataacactacagattaagtttatatactccgattcggagaataaatacttaatgttcgccttttcgttctaatttatgaaagggtcagcaattgctgatattataataattaatcaactctttgtggaatggatgataataaatgacactaggccaaagattaaaatgggctcgaaaaaaatccggttactcaaatcaggacgtaccagccgaaaaaattgggctaacagggaaaacattatccaattatgaaagggattatagatcgcccgatccggagacattaaaaaaacttgctgaattatatgatgtatccaccgattttttagtcggcaaagaagaaaaacacaaacctaaatctaaattggatcaaacaattaatgaagcaattgagcaacttaaaaacgaagagactttacttttcatgaaagatgatgacattgacgaggaaacagctaaattaattaaacaagctttaattaatggtattaaatatgtagatgctatgaaaaagaaagagtgattcttatctatacctccaaaaacatcaaacataaggctgagagcattatccatgaacatggcacaaataatgtttatcaaatttgtgaaaatttaagaattgttttactaaaagaagaccttggttgtatcaacggtttccttcaatactataaagaaagggaaacatatctgatacacgttaataaaaattctgttcaccccgaccttataatcgctcatgaattagggcactactatctgcataagaatctaaattcctttcaaatggaaaactgctccctagtactcggaaataagttggaaattcaagcaaacgcctttgcaactgaattacttttgccggatcacatactgtccaatgaattaccaaactttcaaaattggacattaaaacaaatcgcctcattctttcagctccccctatttgtagtagagtataaaatggagcacatgaaccttttatcatgccaaagacaacaggaattcacaaaattcgcttggtgaatcaagtcaaaatataataagaaggaaggtgatcccataccaaataaaaaagtacccaatagatttattcactgagaaatcaccgtacttaacaagcttttaaccccatggattatttcatggtgcaacaaagaaataaaaacgcacttctcgttaatcacagaatgccgaccaccctcaacatttttttgttaacattacatatttccccacaaaatgatatagtaaatatattacaaagattataaattaagattacaacggagtgcattttatgaaagaaaatctaattacatcagatacatcagttgacgatcaattgaatgaatttttagagcaagtaggggcgagaataagtgactattttggctttagagttataccccaaaaacttgatcaacaaagcatgacatctttaagcatacctcctcatttctataagcctttaatcaagcatcttttagataagctatcaaaagtaattaaggactacataaatttatacgacgtccctaaacccaaccttataaataatattattgaggatctatcgctttatttcatatttggcgattataatgaaaattatgcaaacctaataagtgaattaaaaaacattggtgcgagaagctatgaaggaaaaacagtagatatcggtgtattgtattgtccaaacgataaggctttgactcaattagaagacttaaaagcagatattatacgcctgccagaaaaaaaatcaatctcttcattttttaatgaggaaaagccgtatttaaggttaattgataatatgtcactcgcgcttataatagactctgagtttaaagctatagctttattacgaaaaaggagtgaagaaaaaagtttaaattatattttagaaaaagagtttaattcatatttaaaagacaagctccataatacaattataaactttttcttcgaaatgcttaaagagtcattgggtgatcatatcaatacagtagacttcgaagaaatgaataaagagcactcaacaaagtgtccagaatatacctatttctcacttaaatctaacaaaataaatatattcacaaaaaatgattttgtactaacttattataacggggattggaaattaaaacactataatataataagatctattttagtaaatcatctttttatcgcaaaacttaagcctttagttaattcagttattgcctctaaaaatgatttattgtttaagactttccaatctataattgatgatacagataattttgttgagactttattgagactctctcaaaacaatataagttcaatcatcttaatcgactcaacaaaaaaagaatcccatagagaaaagcgcaagaaactggaacaattaaagattaatgcagtacttaaaaaccaaatacaaaaaccaacttatctaaatgttataaaacacaagaaaaccaatatggaatttcttaaggctgactattatcttattgaggctatttcttcagttgatggggctcttgtattggatgctgatatgagaattgtaagttttggtgagataatcaatactgaaggcaagcaatatcctcagacttatggtactggcactacggctgcaaggtatgcttccaaacattgtttagccattaaaatttctgaagatggtgatatttacatttttaaggaagaacgcttaaagctaaaaatataattacaaacggatagtaaaaataatagcagtaaatattagataggagattcaaatcactatggatattaattcacatataagatatttaggaaatgatacttttgaagatattgctttactagacgcatatcccttaccggatttttgtcctgtatgtaagaagtctattaatcctgaatttattttaatttattttaaatttaatgggcaccaagagcttctatgttcttgcccagataataaatgcaaatctcttttctttgctgtatataaggaatgcccatctgaaacttcggagtattctttagatcacttcactcctttaagtagagaagaaaaacttttccctgatgaaatctatcctctttctcccgactttatagagatatacaatcaggcatatgttgcagaacaagagaaactcaacttaatctgtggggttggttacaggaaagcactcgaatatttaataaaagactttgccctaaagcaatcacctgaagatattgaaaagataaaaaggatgcctttacagcaatgtcttaaaaaatttattactgacccaaaaataaaggctatggcagaaagagctatatggttaggaaatgacgaaacacactatgtgaggaaatggaaaagtaaggacttaaaagatttaaaaaatctaattgaattaactgtatattttatttctataacttttaaggtttcaaaatatagtgaagaaatgtttgtagattaaaataaggataacgactaagttatccttattttttagccactttccaagcgtttctcaacttctcttttagctatttttgttaccctttgtgcttcctcataaagcgaaaacttattagtttttttgaattttaaacagtggatgcatttccacttataagaaccccaaaaagtagatgtttcctctaattcggttttacaatttggacactttgcagtttcttttgcataaactgatccaataattactctcccatagacgtctatttcactgtaaatatcccatacgacacctttgtattcatgttcggcaatttttataccccctgagggtaaaaaagtccaaaaaggactattgctttttctaaacgttattattttatagattaaacatgcaaaaaaccatacaacaataaccgcaatggaaataatcacaggataagtgaataataattcagtccaactaccagtaacaaatttcgaagctacactaactactacgggagtgaccagacttccaattgctgaaactgcaatcttgttcaataacatgataaaaaactttttcataaatttccccctttgctttaactcaaaattatacaacatatttccattaaatccgtagattttctcagttttgtatttttttcaatcattgtgataacctaaaaataaattcaacagaaagtaggtgatcccatgccaaataaaaaagtacccaatagattaatcactgagaagtcaccgtacttactccaacatgcttataatcccgtggattggtatccttggtgcgatgaagcatttgaaaaagcgaaacgcgagaataaacctgttctcttatctattgggtacgggtagcttagcgaacatgtcattggtgccatgtaatggctcacgaatcctttgaggacgaagagatcgccggtatgttaaacgataaattcatagccatcaaggttgatcgtgaagagcggcctgatgtggattccgtgtatatgagaatctgccagctgatgacggggcagggcgggtggccgctgaacgtgttcgtcacaccagatcagaagccgttttatgcggggacgtattttccgaagacgagcaaatttaaccgcccgggctttatcgatgtgcttgaacatctgtccgaaacgtttgcgaatgaccggcagcatgtccaggatattgctgaaaacgccgccgctcatcttgaagtcaaggttcacccggccgagggcatgcttggcgaacaggctgttcatgacacgtatcgccagctggccggcgggtttgatacagtgtacggcggattcggccaggctccaaaatttccgatgccgcatatgctcatgtttctgcttcgctactacagctatacgggcaaggaacaggctttggccggcgtaaccaagacactcgacggcatggcgaacggcggaatttttgaccacatcgggttcggctttgcccgctactcgactgataatgaatggctcgtgccgcattttgagaaaatgctgtatgacaacgcccttctcctgaccgcatatacagaagcctgccaagtcacaggtaatgagcgctacaaacagattgcgatgcagatcgtaacgtttattcagcgggaaatgatgcatgaagacggcagctttttctcagctttagacgctgataccgaaggccgtgaggggaaatattacatatggtccaaaaaagaaatcatgaaccttctcggtgatgaactcggcccgctttactgcaagatgtataacatcacagatcaaggcaattttgaaggcgaaaacatcccgcacctcattttcacgcggcgtgaggccatcctcgaagagaccggcctcacaggacatgagctggccgaacgccttgaagaggcaagaacaaaattgctggaggcccgtgaaaacagaagctatccgcatacagatgacaaagtgctgacctcatggaacgcgctcatgattgccgggctggcaaaagccgcaaaggtatttcacgagcctgacttgctcagcatggcggaaacagcgatccgctttctcgaacggcacctcatgccggacgggcgcgtcatggtccgctatcgcgaggccgaagtgaaaaacaaagggtttatcgatgattatgcttttctcatctgggcttatcttgaactgtatgaagcgggttttaatccgtcttatctgcagaaagcgaaaacgttatgtacaagcatgctggagctgttctgggatgaacggcacggaggtttcttctttacggggaatgatgccgagacccttcttgtcagggaaaaagaggtttatgacggggccgtgccttccggaaacagcgcggctgccgtacagctgcttcgtctcggccgcctgacgggtgatatatcactgattgaaaaagccgaagcgatgttttccgtgttcaaacgggaaatagaggcctatccgagcagcaacgctttcttcatgcaaagcgtactggcacatacaatgccccaaaaggaaatcgttgttttcggaaggaaagatgacccggacagaaaacgtttcattgaggcgcttcaggagcatttcactcccgcctatacgattctcgccgcagaacatccggaagagcttgccggcatttctgactttgccgcgggttatcaaatgatcgacgggaagacaacggtctacatttgcgagaatttcgcctgccggaggccgacgacggatattgatgaagcgatgaacaccttacaaatcagcagcagagcctaggcggcctgctgcttttcttttttcacaaaacggaatgcgagccatgcgaagatgatattgatcaccagagtcgatatgcaatcatatatttcataaccgccggctgctgttgtaaatatcgacggaatgccgccgtacaccgaatgatcctctgtgagaaagataaataaaaacatattattggcagcgtgaccgccaagagacatctccagactgcccgttttaatcgtgataaaggtccagatcatgccaatggtgacatatccgattcccgcccagagagctccattttccatctccggattcccgaaatgaagtgcgccgaataatccgccgataatgactgtcagaaccaccgcgtttgccgtcaattttccggcgaactgaagcagaaaaccgcgaaagagaaattcctccgcagaggtttgaatcggcaccaacaagacggccgccgctaacagcagcagaaaacgtgaagcatggaattcctgaagcatgaaacgatccggatgaattgtaaaatcaatcagccccgcgacaaacatcagcacaacatatgtgccgaatccaaagaaaatcctcttccagttcagcgactgattcggtgtgatgatggataaaaaccgccgtttcataatgaaacgaaccgctatccaaatgcccggaatcgctatgaaatagacgatatgctgtaaataaatatccgccagcgggtcacttaatgccccctcatcccaatttatcgtcagtgaaggattgaaagcggacgtgagaaacatataaaacacggtcagtatgcttccgaaaaagaacaaacccacaatgaccaacagagaaagaagatatctcgatacactatttcttccctctgctgggcgtacaaacgtattcatatttatgcatcaacttcctttccttcaacattttacaatataaacagaaacagatataggaaatgttatatattttaagaagaaagcgctatgccgtttcctttggctctggttatttacactctgtttttgccaaaaaaagacctttataatgtattcgtcagataaatttacagtattttctgattacaattgctaagtcagggggttttttatgaaacatcagacattctcaaatgtagcgaatcgattagaccgtctccccatttcgcgtgtgcattatcaagtattaaccgctctcggaatcatctatttttttgatctcgctgatctgtttacactcagcaacgtggctccggcgctgattgagcattggggcgtgaagctgtccaccattgccgacatcacggccgcatccttcctgggcatgtttttaggcgcgtccatcggcggaaggctgtccgatcggatcggcaggaaaaaagcgctgaattgttttgtccttgtcttttcgatctcatcttttctgaatgcgctggcatgggacattccgtccttaatgattttccgcttcttgaccgggctcggcgtcgcggccgccatgattgtgacgaacagctatttggcggaattttttccatcctccgtacgaggaaaatacatctccctttgcgccatgatcggactgatcggcgttcccgtcacaaacgttgtttccgcttttgtcattcctttaggctcatgggggtggcggctcgtattcgtatggggggcggccggtctcatttatttcttttttatccgccggcttgaggaatcgccgcgctggcacgaaaatcggggcgcatatgatcaggcaaacgccattatgaaccgtcttgaagcacgtgcagagaaagaaaaaggcccgcttcccgcgccaaaagaggcggcagaagtacatacagtgaagcacgcaggctacttagggctgtttcagggcaggaatttaaagatcaccatcatcctgtcagcggtatggattcttgaaacctttggcttttacggctttgcttcatgggtgcccagcctgctgaaaagcaacggcatcaccatggaaaaaacgctgtggtacaatgtgcttcactctgtcggcgcaccgcttggcgcattgctcggttccatgatatccgagacgttccaaaggaaatggattctggccgcaagcgcttttctgaccgccattgccggactgttatatggcatgacgtttattcccgtcatgattattgtgtttgggtttgtcgtcaacgtcacggaacggatcttcacctcaaacttatacgcctacacatcggagccgtatcctacggaatatcgctcggccgggagcgggctggcgtacgggctcggccgtttttccaatatattcggctccctgctcgtcggatttattgccgttaagctcggctacatcagcgtctttttgttcatcggcggctgctggcttctatgttccgttttgttaatcctcttcggtccgaaaacaaatgcacagcaaatttaatcaataaaacagtgcggaaccactccgcactgttacactgtgatttctatcaaattgccttccccatcctctatcacgctctcataatatccgtcacccgtcacgcgcgggccgcttacaacctgaaatccatcatttttaaacgtctccgtcaattcattcacccgctccttgctgcctgtagaaaatgcgagatgcgcccatccggtcatattctgtgccggagcttcatcaatgccgccttttttcataagttccagcctgcatccggagtcaaatgtcagaaaatacgatttgaaatcttttttctcattatgataaaggtcattggccttggcgccgaagtatgtctcataaaactctttcatccgttccaaatctttcacccatatcgctgcatgttcaattcgcatatgtccgcctccctttttttctcaatctatttataaagcatgaaacccatttcagctcaagactttttccgctgaaattgatgcataatttgttttttagccgtttcttcgtgaaaaaacaataaaaatgcttcctttccgacccgttccaaatgaagttccagggatggaatattcaatgcccggctgacgctcagatttccctcgccgatgatctccgcatcccatttctgttctttcgcaaactggtacaagccggcagccacgtcatcactgtgcgcatagatggccgtcggtgccttgtcgaaaccccagaagtgctcacccgcacgctttccgtcgtccatatcatggcatccgaccataatgcgggtttcatcaagagagccgaaaaccgccttatatgcggttaccttgtcggccgtactcgggcttttttccgcttcccgcacacatgtaaaagcaacgtcttgatgtccgcggtttttcaaatacaaaaagctttctctgtatgctgcctgcctgtcattataagcgcagggaatctcttgatgctgtgtatattcacaagcgacaatgggaccgtattccaggtaaggcacggcggtttcccattcattcgcgcgggacgtgacaatcagtccgtcaatctttttcattttcagcagttcgaaataggtcatctctatagcggggtcataattggtggggagaagggttgtcacgtaatcatgggcaaacgcttccttcgtgataccgtttacaattttgtcaaagcagggatggtcgctgtacggcaaaatcacaccgagtgtattggtctttccgcgaatcagatcaatggcggttcgattaggggtataatccagctccttcatcacttgattcacaagacgccttttctcctcagagacgtacggatgtcggtttaatacgcgtgatacggtggccaccgacacattcgccagtttcgcaatctcttttatatttgccatgtgctcctccattttcggtgataaaaaagcagcaagagtggatttctcttactgctatctcatcataaatccactgtcatttcaacagggcaatggtcagaacccatgatatcggcacaaatggccgcttggctgatccgctgcttcagtctgtctgaaacaatgacgtaatcaagccgccagccgatgtttttctcacgtgcgttcgtcctgtaagaccaccaggaataggcgccttcccgatcaggatataaatagcggaatgagtcggtaaatccggcgctcagcagggcgctgaacgcttcccgctcctgctccgagaaaccggcgttcttccggttggctttcggattttttaagtctatctccctgtgtgcgacattcagatcgccgcataagatcacaggcttcttccggtcaagcttctgcagataatccttaaaatcggcttcccattgaagacggtaatcaattcgctctaatccgcgtttggcattcggcgtataacagttgacgacaaacacatgctcaaatttaagcgtgatcacccgtccttcttgatcatgttcgtcaatccccagtccatagaacacgtgcagcggcttttctttcgaaaaaacagccgtgcctgagtagccttttttcaccgcatagttccaataggcgtgatatccttcaggttgtaatgatacttgtccgtcctgtacttttgtttcttgcagacatagaatatcggcttccgtttcttgaacgtaagtattgatatctatctttttcatcacggcacgcaagccgtttacattccaagacatcagtttcatgtgatccctcctgtccggctcagccggtattccagtgtttcaatgtttccgccctctaatgccagcagctgctttttcatttctaaaccgcctctgaatccggtcagtttcccgttttttccgatgacgcgatggcacggaaccgtaatcagtaccggattttttccaatcgcggcgcccacggctcttacggctgccggtttctgaatcatttttgctatatccgaataggagtatatctcgccgtacggtatgtccataagcactttccatacagcaagctgaaattctgtcccgtaaagatccaccggcactgaaaaagctgatctgccattttcaatgtactcggacagctctgccgtgtaaggcgccagcttttcatcatcacgtgccaatcggtattgcggtattgctttttttgcccactgctcaagctcttcaaagcttccataatttgaacctataaagcaaagccccttagatgtggcggctgtatacaggctccaatcattccgtgtgaaaagtgtccaatagaccataggctctttactcatattgaacctccctatcccattttggcggtttttctgtattctgtgggcgaactcccgattctctttttaaaaagattcgcgaaatgcgctgtgtttggaattccgacagccagagcgatctccatgactgtcatatcagtatgctttaaaaggtgttccgccttcgacaatcttattttctgtatatactcaatcggggacattcccctgatttttttaaatgtccgctgtaaatgataggggctgccgtgacacatttcggccaatacgctcaaagtcagggattcgtgataatggcggtcaatgtactcagtgatttgagcaatccattcttcatcaggaagacgaagaccgttcggccggcaccttttacagggtcgaaaatgtctctcgatcgctgcatcagccgtatcaaacaccagcacgttatctttattcggaactctcgatttacaagaaggccggcagaaaatccccgtcgtttttaccgcataataaaatgccccgtcataagaagcgtcattgtgtataattgcgttccacttttcatctgtcaggatatttctttctgtttccatctcagccaccccctgtttttcagtataaacaaattcattggataagtacgcgtttttgaatagaggagcaagataacaaagataggtgtcaggagcacttccatgtttcatgtgaaacatttcggcaagatggagagggactgatataaaaaaagagcaggagcccgcaggctcttgctcttttctttcggcttactcgccagttacgtatggaagtaaagccatttgacgtgcgcgtttgatcgcgatagtcaatttacgttggtatttcgcgtttgttccagttacacggcgaggtaagattttaccacgctcagaaacaaactttctaagaagatctacatctttgtaatcgatgtgcgtaatgccgttagaagtgaagtaacaaaccttacggcgtttcgcacgaccgcctctgcgtcctcctgccattgtcatttcccacctttctcgttatgaatatagcgataatctattagaacggaagatcatcatccgagatgtcaatcggcttgccgtcgttggcaaatggatcatcattaaagctgttcccttgatttcgtctctggttgttctgatttccgccgaacggattatcattttggcctccgccaaagtattggcctccgccgctgtttccttcgttgtatccgcctgatccagaaccgccgctgtttttaggctcaagaaattgaacactttcagcttggacttctgtcacgaagacacgctgtccctgctggttttcataatttcttgtctggagtcggccgtctacgccggcaaggcttccttttttaagaaagtttgcaacgttttcggcttgtcttctccaagtgacacaattaatgaaatcggcttcacgttctccggactggttcgtgaatgtacgattcacagcaagagtaaacgtggcgacagccgcaccgcttggcgtataacgaagctctgggtcttttgtcagtcttccgactaatacaactcggttaagcatatgaaagaccaccttttaacattatatatttcaaattgcttattcttcttctttaacaacgatgtggcgaatgatatcgtcactgatcttagctaaacggtcgaattcagcaaccgctgcagcttcagactgaacgtttaagatttggtagaaaccgtcacggaaatcgttgatttcgtaagcaagacgacgtttaccccaatcttttgttccagtgatctccgctccgttagaagtcaatacgttgttgaaacgctcgataactgccttctttgactcttcgtcaatgttcggacggataatgtacataacttcgtactttttcatctgtttgcacctccttttggtctaagcggccctataatgggcaaggagcaataattctattactcacaagtttatattataccaaagctcttgtccctttacaactgtgtcctatacattaaatcggaaatgaatgacatctccgtcttggactacatattccttaccttccagacgcacttttccggcttctttcgctccggacattccgccgcctgccaaaaggtcttcataagcaaccgtttcagcgcggataaagccgcgttcaaagtcagtgtggatgatacccgcacactcaggagctttcatgccttttctgaatgtccatgcgcgcacttcctgttcgcccgccgtaaagtatgtcgcaaggccgagaagagagtatgacgctttaatcagctgatcaagacctgattcttcgatgccgagctcctcaaggaacatttgtttttcttcgccttccaattcagcaatttcagactcaattttcgcgcagacgacgataacttcggcgttttcacccgcggcgtactcccggattttcgcaacatattcattatctgaaggatcagccacttcatcctcgcttacatttgctacataaagcacaggttttgacgtaagcaaatgaagctgcttcacaagcttttgctgttcttccgtaaattcaacggaacgggcaggcttttcttgttcgaaagcttcttttaatttagacagaatgtcaaattcaaaaaccgcttctttgtctttttgcttagcaagcttgcttacacgcgtgatgcgtttttcgactgtctccatgtcggcaagaatcaattcaagattgatcgtttcaatatcgtcaatcggatcgactttccctgacacgtgcgtaatattgtcatcagcgaatgcgcgtacaacgtggcagatcgcatcaacctgacggatatgagaaagaaacttatttccgagtccttcaccttttgatgcgccttttacgatccccgcgatatcagtgaattcaaacgcagtcggcaccgtttttttcgggttcaccaattcagtcagcttttgcagacgttcatccggcacttccacgattcccacgttcggatcaattgtacagaacgggtagttggctgattcggcaccagcctgggtaattgcattaaataacgtcgattttccgacattcggcaaaccgacaattccagcagttaaagccattctttcatctcctctatatcaaaccatcatcgtataaacgtattgtaaacctagagcaattataaggaggttcataggaaaagacaagctgagaaaaaagcatttcccgccctctctctccttagattatccttttttaaccgctaccagacagtcaaaaagcgtacttcccattccattatcggaatttgaatcctttgtgagcatgttgacggagcctccgaatgccgcccacatgccttcatctatattcaccgtcttcgggtgagcctgcttcatgattttcaccctgccgcgcagacggccgcggtcattgtatacctctgccgtatctccgtcttgaagtgaaagctcctcggcgatatccggcgacagatccacctgaatctgctgaagcttttcaataaacggcacgtgctgtgaatgattggagcgctgcgggtgaatggacagcagcgtatacggatatttcccggccagtccggcgtcatgataaacagactcctccggcacctccaattgagggaggccgctgtatcctttctcttctgccagtgacgagacgaattcaaattttccgctcggggttaaaaattgaaaatcactccacggaacctgtttgaccggaagcggcatatgtcctttttcctttaattgctcaagggtgattccttctttctccaaagaagagagccccatttttaagaaatcttccgtactgtaatcaaagagctccccgaatccgagacgctttgcgagttccgtccagatccagcggtctgattttgcctctccctgcggttccgcaagcttcttgccatattgaacatagtgatgatacatgctggaataataaatatcttcctcttcgaaaacaacggccgtcggcagcacatagtcacagagcttcgccgtatcggtcatgaccgaatcaatggccactgtgaccggtgttttttcaaatgcttccttcactttttttgtattcggcacctgtgtcagcggattgccgcacgtcacgatgatcatctcaatcggcggatcggctgcattcagcgcctcttcggcttgagtcatcatcgaaaacgttctcgaacttttcttcagatcaggccgggtgagctcggcctttgtaaagctttcaccgacttgcacatttccgaagtttgcgccgccgcctttgataccgacatttccgctcgccgcagctaaagcgtcaatccaccgtatcgtcccgcccccgtttttatatctctgcatcccaagacccataaaagtggaggcgggaccgtcagcatataaatcagcaagatattcaatcacttctaaagacgtttctgttttctcaatgatctcctcaatagaaatcgtctgcagaagcttttctatttcttcaaaaccgaccgaatgcctttgaatgaaatcggaatcggttctgccggtttggcataatatttttaaaacacccgccgcaagccatccatccatgccgggtttgacggatatataccgatcggcaagctttgcagtcgggttaaaaataggatcaatgaccgtcagtgtcgctccttttttcttcatctgctgcagatgatgatagaggtgcatattcgtccgggacacgtttctgccccatacgatcacatgcttgctgtgataaatatcaagcggtccatgcccgtaagaacgcccgaaatcccagcgctgcgcttcaatgccggaaccccagcatatgctgcccgcaatctccgtcacaccgccgtatccattgaaaaaacgctggtcgagcgccttcaaaagaccgttattggcgtaatcatgactgtgcagcactgcggcagtgcccaacgtctccttaatcaccgccattttttcagcaatttcatctaacgcctgctcccaggaaatgcggacaaattcgccgtctatcttttttaaaggaaaacgaagccgttccggcgcattcgttttcgcctccagcattctgccacggccgcaaattttcccttccgtaatgggatgattcgggtctccgtctactttcgtcacctttccatcctcaactgttaccaaaaagccgcagctgtcccagcaattcagcgggcacgctgactgatgcactttgctcatcgggcctcttcctctcctctatatgaaaaagcatgagcgccagcccttatgatgtaggctcctcatgcttgacgagtacttttttcagctttctctcaaaatctcttctcggaatcatgacactgtgggaacaacccgtgcatttaatccgaatatccattcccatccgaatgattttccacctgttttcaccgcaaggatgcggtttcttcatttcaacaatatcattcaggccaaagtctttatccgccaagacccttcacctctctccatagactgctttatttattgtacaaaaaaaaacaggataagagcaacggccgcacccaaaatgagcattatacttttttccatctccctaaaatagggtaaagaagaagacataccagcaaataaagacttaaaagcccgtaaataggatataaaatggcgatcaaatctgaaaaaccgattgtcgtaaaaggcaccatcacagctaacagaagagatacgagcgtccatctcggcaatttcacaaatgcaagcatgcggctggacagcccgaacagaccggtcacggttgtcgtatagatggctaaaaaaagcacggcggccatacaaagaaataacggataaggagcgccttcaaggacggcgaaaagaggaatctcatattgtgtaagactgcctgaaagctgtacaagcgtttcattgtaaacaaatgaaatcataccgaaaatcagcccgcttgcaacgcttgcgattttcgcttctcccagtcccttcatatctttcccgattgaagaaagaacagcgacaacagaaaggatgtttaaagacgtgaaggtaatgcttgccggccaattatactggcgggtcaaatctatcgtccacgtgtaatgatgggttgtctgaaaaaagaccaatgcatataacagccccgctacaagaatcggtatcaaaatactattcagagataatattccttttatatcccaaaagaataaaccgacggtcacaatgcaaagaagaaaaataccgatccaaaacggcagcttgtacatttgcagcgtcacaccgccgccggcaatcataaccatcgtcattgaaaacaaataaaacataataagcacatcatagactttagcaagagccggccccatcagatgctcaagcacaggtaaaaagtgcgttgattgaacccgatagctgatcttcaacacaatataagccgaaatcgtaaacatgactgtaaacaatacaatagccagtccgctttcgacaccgaaaaactgccatatttcctgcccgcttgcatacccagccccaatctggctgcttaatatgagcagcatccacttcatcccggctctccacaccctcatcacctcataaaatttctgataatctccgcatattgctactatattgagtgacagcggcaatcattcatacaaatgggacaaatatggtatgatatcgacgattgactattcagaaaaattcacttatgcaaggagctcaaaccatgtacatcaggcgtttaaccgcaaatgatacccagccttataccgatatcaggctcaaagctttaaaagatcacccggacgcatttgccgtcagctatgatgaggagaaagaatggccgtccgaaaaatttaaagccaggcttgaagccgacaatgccatcgtgcttggcgcctttgaaaaagacagactgataggaatcctcaagatctccaagcatccgctgtttaaactaagacacattgcggttatcggttctatgtatatttcccccaaacaccgagggtcaggcgcgggaaaagcgttaatgacggaagccatcagccgagcaaaaaagatgaaggacacagaacagctccatctctctgttacctcaacaaatgaacccgcaataaaactctacgctcagttaggatttatcctcttctctacagaaaaaagagcgctgaaattagatcatcagcaatatgttgatgtagatcaaatggtcttatttctttcatgaacttagagaataactgctctgggttcttttttctatcccgctcttttcaaacaaccggcatgctgatcatgacataagcataaaaaaaggcagcgctggatatactgtaaacaaccatacatcaccaaaaacaacaatgtaatactcgtatgacatgacaaggaagtgaaccttatgaatcgaaaaggcgggcttttttctcaagaacgggcaaaacaatatgtatctcatacggattcttctgctgcgaatcaaatacaagcgatccttacttcatctttacgtaaagcagccggcagaccgttagtcaccgtgtgtatcggcacagatcggtcgaccggagattcattaggtccgctcgtaggaacaaagttagaaaaaatgaatttaggcagattgcacgtttacggcacgctgtcagatcctgttcacgccgtcaatatgaaagacaagctgaaagatattcaacatctacataaaaatccgtttattatagcggttgatgcttgtttaggccgcgtcaaaagcgtagggtcatttcaaatcggcgatgggccgctgaagcccggagcaggtgttcaaaaagatcttcctgaaatcggtgacgtccatatcaatggaatcgtcaatgtcagcgggtttatggagtattttgtcctgcagaatacgaggcttcatcttgttatgagcatggcaaatgttttagcagaggggttacagctgacagataaatcagaaggccggcaggaacggctcagtccatttcataagctgacaagacgtatataaaaaaccatctttttttaaaaagatggtttttacgcttctctttcagacaatagttctaggatacgttcaagatcttcatttgagaaaaactcaatctcaatcttcccttttttcttttgtctctttatatttactgttgttccgaagtaattttgcaaatacgattcccgctcttttaacaccacatcttggacaggttcttttttctttgtttcacgtggaacattgttgtttaactgctgaatcagctgctcaagctgacggacgttcagctgttcttcaaccactttcttcacaagcggttcaagcttgtttttatttttcaagccaagcaaggttctgccgtgtcccatggataacgtaccttctgcaatgaggttctggatgctttccggcagcgtcagcagtcttaaatggttggcaatatgaggcctgcttttcccgagccgtttagcgagctgttcctgggttaaatctaaatgcttcagcagtgagtcatatgccagagcttcttcaagcggtgataagtcttcacgctgaaggttttccaaaagagcgatttcccgcatcagcgattcagataaatcccgcacgatagccggcactgtctctttaccggcaagttttgcggcgcggtaacggcgttcgccggctacaatatcatagcccttcaatgattttctcacgataatgggctgaagaatgccatgctgaatgatggattccttcagttcagctaatgactcatcgtcaaattgttttcttggctgataaggattggggcgtaaatcactgattttaatctcttccactgtctcttcagacaaatcaacctgattaaacaacgcgttaatcccttttccgagcccgcctttagccattcgctgccacttcctttgctaaatctaaatatacttccgcacctctcgaacgcggatcgtataatatgatcggcttgccgtgactcggcgcctcacttaaacggacatttcgagggataatggtttgatacactttatctctaaagtatttctttacctcttctatcacttgaatgccgagattcgttctggcatcaagcatcgtcagaagcactccttctatcattaaatcggtatttaaatgtttttgcacaagccgaactgtatttaataattgactcaatccttcaagagcgtagtattcgcactgaaccgggataacgactgaatctgaagcggtaagcgcattaatcgttaataacccgagagacggaggacaatcaataatcatgtaatcgtaattttgtttcacagattctaatgctcttttcagcctgacctcccgtgagatcgtcggaaccaattcgatttccgctcccgcaagctggatcgtggccggaatgacatctaagttctctactgaagtcggtttaataatatctgtaacatctgcatcatctactaaaatgtcgtacacacaatgatccacatcggctttttcaatccctaatccgctcgttgcattgccctgcggatcaatatcaacaagaagaacccttttacctatgtaagccaagcaagcccccagattaacagaagtcgtcgtcttcccgactccgcctttttggttcgtaattgctatgatttttcccacgatgtcacctaccttcacatgaacatgtactgtcttgtttctatcttatcaaaaaaagagtaaagcgttttatttttttcataatttgtttatcagcaagtgaaaaaaatgtaaacgaaaaagacactttctaatataagttctccgataaagtgacttttttgactgtaaaaagacaattcacgacacaaaaagataaaattttacatatataatgtatagtgcacaataaatctatcattatctcaaaatagttttttgattaaaataaaaactcccctgctgatcaggagagtttttatttaggtatccgaatggtaagctggatgtactcttcgaattcttcttcttcagtgttcagcctgacgccgctgtcttctaccatagacagtgactgacgaatcgtattcatcgcaattcttgtatccctgctgaacgctttgcgtctcggctttggtttctccttattctgttcaagcattttcaccactctgtcttccgtctgcttaacgtttaagcttttctcaatgatttccgcaagcaatgtgacctgaaactccggctgtttgagcggaatcagtgctcttgcatgacgttccgtaatttttttctccataatcgcatcctggacgggttccgggagctttaacaatcggagcttgttcgcaatcgttgactggccttttcctaagcgctgcgccaaggcttcctgtgttaaatcatgaagttctaacagccttgcgtacgcatgagcttcctcaatggaggacaattcttccctttgcaggttttcaatcaaagcgacagatgctgtttccgtatcagaaaaatctttaataattgcgggaatcttctcccattcaagcgtctgtaccgctctccagcgcctttcacccgcaatgagctcatattgtccttcatcttctgtatgtctgacaacaatcggctgaatgatgccgtgtgtatggatagtcattgctaactctttgattttttcatctgagaaaatggtgcgtggctgaaaacggttgggaacgatagcatgtaccggtatttcgagtatctcttctttgtttgtatcatgctcagctatctccggttcctcttccttctcaccaaacccgaagaaacgagagaatgaatgcttcatgtacctacaccacctttaaaaactgccatttttataattctattttctcatggtttttcctgctgtatcttcatcaattttgcagaaaatatgatggaattgtcacatcaggctgtctaaattacccttcaattggcgatttatttggagtacccggttttctcggatattttttcggagtgcttttcgtcttacgaatgatcatgatgttccgttcactttcttcaacaggaagtgtaaaggaatgaacttgttcaagctctcctcccaatactttaatcgccttttgccccgctttcagctcttcatcagctgctgctgcttttagtgccgcaaatacgccgtttttcttggccagcggcagacaaagctcactcaggaccgacagacgcgccaccgcacgggccgtcacgagatcgaagctttcccgtacgtctttccgctgtccgaatgtctccgctctgtcatggacaaatgtcgtatgctctaattgtaaagcatcagagagagtttccaaaaacgtaatccgcttattcagtgaatcgacgatggtgacatgcagatgcgggaagcagattttgatgggcaggcttggaaaaccggcgccggcgccgacatcacaaagagtggtaaccttttcaaaatcaatataaaatgccgccgttatcgaatcataaaaatgcttgagataaacttcctttttctcagtgatagatgtcagattcattttttcgttccattccacgagcatccggtaatacaactcgaattgctccagctggcggtcagaaagggaaatccctttctccgctaaactggatgtaaattcctctatattcatgccgtcatcctttctattcagctaccttggcaatacggccctgctccaggtataccagcaggattgaaatgtctgccggattgacgccggaaatacgggacgcttgagcaactgataaaggacgcacttctttcagcttttgacgggcttcagtagcaattcctttaatggcgtcataatcaatccgatcagggatttttttattttccattttcttcagcttttccacttgctgcaaggatttttcgatatatccttcatatttcacctgaatttccacttgttccgccacatcttgcggcaccggagaatctgcaggcgcaagttttgtcactgtttcatagttcatttccggacgtttcattaaatctgtgccgcgcactccgtctttcagctcgcttccgccgagagaacggatatattcctgattctcaggagacggcttgataataacagaccagagacgttttttctccgcctcaatcgccgcttttttcttctcaaacgcttcatagcgctcatcagaaattaagccgatatcgtggccgatttccgtcagacgaagatccgcgttgtcgtgacggagcagcagtctgtattccgcccgtgaagtcagcagacggtacggttcattggttcctttcgttaccaaatcatcaatcaatacaccgatataagcatcggaacggctgaggatcacttcttcttttccaagcgctttgcggcctgcgttgatccctgccataattccttgcccggctgcttcctcataacctgatgtaccgttaatttgaccggccgtgtacaggttagggatttttttcgtctccagtgtaggccagagctgcgtcggtacgatcgcgtcatactcaatcgcgtatccggctctcatcatctgcaccttttccagtcccggaatggtcgccagcatccgctgctgcacgtcctcaggaagactcgtggataaaccttgaacgtatacttcctgcgtatttctgccttccggctcaaggaaaatctgatgacgcggtttatcattaaaccgaacgactttatcttcaatcgaagggcagtatctcggtcccgttcctttaatcataccggaatacattggcgaacgatgcaggttgctgtcgatgatctcatgagtctcaggactcgtgtaagtcagccagcaaggcagctgatcggtaatgtattcaaccgtttcatatgagaaagcgcgcggaaccgggtcccccggctggatttctgttttgctgtaatcaatggaatcgcttgagacacgaggaggcgtacccgttttaaaacggacgagatcaaaaccgagctcctctaagtgctcagaaagtttaatagacggctgctggttattcggaccgcttgagtaagacagatcaccgagaatgatccgccctcttaaatacgttccggttgtcagcacgaccgtttttgccttatattcagcaccggtttgcgtaatgacaccgcggcactctccgtcttcaatgattaaacgctcggcaatcccttgaagaagtgtcaaattcggtgttttttccagcgtatgcttcatttcgtgctgatattggaatttatccgcctgcgcacgcagcgcccgtacggccggaccttttcctgtattcagcattctcatttgaatatgcgttttatctatatttctagccatttctccgccgagcgcatcaatttcgcggacgacaatccctttcgcggggccgccgacagacggattacatggcataaacgcaaccatatcaagattgatcgtcaaaacaagcgttttggctccctggcgcgcggatgcgagggcagcctcaacaccggcatgcccggcgccgatgacaatcacgtcgtattggcctgcttcataccccatggttttttcctcccttttatttacctaaacaaaattgtgaaaagagctgatcaattaagctttcgtggacggcatcaccgatgatttcgcccagcagctcccagcaccttgtcaaatcaatttgcaccatatcaatcggaacatcctgttcaattccgttcagcgcatcatcaatcgcttgctttgcctgatgcagtatcgagatatgacgggtgttgctgacataggtgagatctccgctttcgatcgctcctgtataaaatagcgactgaatcgcttcctctaaatcttgaatgccttcttctttcagcaatgaggtcgtgacgacaggccggcctttcgccagttccttgacgcgctcagcgtcaatcttagcctcaagatccgtcttattcataatgacaatgacgtccattccctcaaccgcttcaaacaatttcacatcttcttcagaaagctcttcgctgtggttaagcacaagcaaaatgagatccgcttccttcagaacctgccgtgaccgttccacaccgattctttcgacgatgtcttctgtctcacggattccggcggtatcgacaagccgaagcggcacgcctcggacattgacatattcctcaatcacatcacgcgtcgttcccggaatatcggttacgatcgccttcgtttcatggacaaggctgttaagcagagaggattttccgacgttcggacggccgatgatcacggtagacagtccctcacgcaaaattttcccctgctcagacgtacggagcagcgcctcgatttctttcttcacgccgcttgccttctccactaaaagctgatgcgtcatttcttcgacgtcatcatattccggataatctatattaacctcaacatgggcaagtgtttctaacaactcatcacgcagacggcggacaagcgcggaaagccgtccttccatctggttcatggcgacattcatggcacggtccgttttggccctgatcagatccatcaccgcttccgcctgtgaaaggtcaatccgtccgtttaaaaatgcgcgcttcgtaaactcaccgggttctgccagtctcgcaccttctcttaaagcaagctggagcacctgattaaccgtcacaatacccccgtgacagttgatttcaatgacatcttcccttgtgaatgttctgggcgctcttaaaacagacaccatgacttcctcaataatccgtcccgtcgtgctgtccgcgatatgcccgtaatgaatggtatgcgattctgccgaactgagcgttttgcctttcggacccttgtacattttgtcggcgatctttacggcttccgggccgctcagccgaacgatcgcgatcgcgccttcacccatcggagttgaaatcgctgcaattgtatccatgctgttcacctctctttatctctgtttccatctatataaaaaattttatttacgccaaaattaaaagataacatagtttggtttgaagtggaagatacgttatccacaaaggcagaaattcatcccttattactttaacttatccacatgtgaataacaattaattttatttcctaaaaccttttttatcaacagcatagaccgaaaaagaaaaaacttaaacgcgaaaagtgcgattctgcttaggaatagagccatttttaccaataaaaaaaccgaagttccgattttacccggacttcggttttctgctatctttatgggaaataacgagatggcggtaccggccttcaccggtagaaaacgttttgatatttggatgctttgacagcgcgtcatggatgatttttctttcacctgacggcatcggttctaaatgcacatcttttttcgttttcgacacttgcttggccagcctgtttgccagctgctccagaatttctcttcttttccgccgataattctcagcgtcgacaacggcttggcgatactggccggagccgcggttcaaaacaagctgcgtcaatgtttccagggcattgagtgtttgtcctcttttgccaataagcagcgccgctttttcacctttaatgtgaaaacagactgttttcttgttttcttccgtaacaatctcagaaggtccggcaatggaatggatgatttcttccaaatacgctttcgcttcatgaacaggattttttttctcttccagttctacgatcgcattcttttttccaaaaatacccaaaaaccctttgtatccttcttgcaccaccgttatttctacttgatctttcgtcagttgaagttcctgaaggcctgattgaactgcttcttcgacattccgtcccgcagcagtcaccttcttcactttttctttcctcccgctttctgcgtttccggatcgtgtttaatgtcaggtcctttaataaggaatgtctgagcaatcataaacaggtttccgactacccaatacagagaaagcgcgctcgggaagttgatcgcaaatacgatgatcatgatcggcataatccataccatcattgccatttgaggattctgagtcggatttccggccatcatcagcttctgctggacaaaagtggccacaccagcaacgataggaagaatatagtaaggatccttctctcctaggtcaaaccataaaaagctgtgctgtgaaatggcttgcgtacgcataatggcgtggtagaatccgatcaaaatcggcatttgaatcaggatcgggaaacatcccgccagcgggtttaccccgtgctttgaaaacagggccatcgtttcctgctgaagcttctgctgcgttttttgatctttagagctgtatttttctctgagcttctgcatttcaggctgcagcgcctgcatcgcttttgagcttcgaagctgcttgatcatcagcggcagaatcagcagacgaattaaaatcgtaacgatgatgatcgataaaccatagttatcacccgtcagtttcgctacgtacgtaataacttctgacaatggatacacaacatatttgtcccagaaatgcggactattcgccgtaatcggctctttcacactcgagcacccggccagcagcacgagcataccgaccatactcagtagtaaccatattctccttttcaagaacgtttcctcctataccaatctttatgaaccttgtatgtattttagcatctttcagtttcaaatggcgttcatttttcgccaaataaaaggaagcgcttttaaaaacgtgaagaaaacaaaatatgagctattttgacgaagatttcttatataatgaggtttttctgaataagtgctgcagactctttttcgtttcttcaaaactgaggtcgccggcgggttttcttgcgataataataaaatctttcggcttgagcagctctttttcctcctgaacagcctgtctgattaaccgcttcacccgattgcgcacgacggcattgccgatttttttactgacagaaagccctacccggagctcttcctgtttcggctgatcaagcgtatacagcacgaactggcggtttgccatagacgttccgcgtttaaacactttttgaaaatcttcatttttctttaaccgatttcgcttcttcactttaattcactccgatattcactcgcagaaacttttatttctatctaaaaaaaacgggccgccggaatactgaagaaatttctccagtaccgggcgacgcatgacatctcactctcttaatgtgaaaaaagaccactgacattattcagtggcctaagctgataatacttttctgcctttgcggcgacggcgtgctaatactagacgaccgttttttgaactcatacggcttctgaagccatgaactttactgcgtttacggttattcggttggaatgttcttttcatttatgacacctccctcgaggaatagctgttaaagacagtcttacttattatatttgtgctgcctattcattgtcaacttcagcagtgcttttatttcttacaaccataataggataacataccttaaccagtttagaaaccttatttttcatattcctttttttaacgcaaaaaaaaagccgcgctcccccgaaaaaacgacatgtggataattttttggcctttttttaatatccacagtcgttatcgacaacattttcacattgctaactcctgtggacaaagatttttcaacaagttgtcaggtttgtggataagattacgagaaccattgcaagtcctcgcttaatttgatattatatttgtgttttaactcttaattacttatccagtccattctctttatccacaaactgtggataagttgtggattgttttcacacagcttgtgtagattgttgtccacaacttgtggaatttgtcgaaaagctgtttttctactatactatatgttttcaacatttcgtgtgtacgaatggtcagagccatatgctctttttttgtgttctataacagggaaagggtgctgatttttaaagaaaaggagggctgtgccggata
